(19) United States
(12) Patent Application Publication
(10) Pub. No.: US 2023/0265151 A1
(43) Pub. Date: Aug. 24, 2023

(54) GIP/GLP1 CO-AGONIST COMPOUNDS

(71) Applicant: Eli Lilly and Company, Indianapolis, IN (US)

(72) Inventors: Jorge ALSINA-FERNANDEZ, Indianapolis, IN (US); Robert Andrew BROWN, Carmel, IN (US); Robert Chadwick CUMMINS, Carmel, IN (US); Mohamed Elsayed Hamed ELSAYED, Fishers, IN (US); Andrea Renee GEISER, Greenwood, IN (US); Xianyin LAI, Carmel, IN (US); Hongchang QU, Carmel, IN (US); Brian Morgan WATSON, Carmel, IN (US)

(21) Appl. No.: 17/794,128

(22) PCT Filed: Jan. 21, 2021
(86) PCT No.: PCT/US2021/014302

§ 371 Date: Jul. 20, 2022

Related U.S. Application Data
(60) Provisional application No. 62/964,932, filed on Jan. 23, 2020.

(51) Int. Cl. C07K 14/605; C07K 14/645; A61K 38/26; A61K 38/22; A61P 3/10

(52) U.S. Cl. CPC C07K 14/605; A61K 38/26; A61K 38/2235; A61P 3/10; C07K 14/645

(57) ABSTRACT

The present invention relates to compounds having activity at both the human glucose-dependent insulinotropic polypeptide (GIP) and glucagon-like peptide-1 (GLP-1) receptors. The present invention also relates to compounds having an extended duration of action at each of these receptors. Furthermore, the present invention relates to compounds that may be administered orally. These compounds may be useful in the treatment of type 2 diabetes mellitus (“T2DM”). These compounds may be useful in the treatment of obesity.

[0001] The present invention relates to compounds having activity at both the human glucose-dependent insulinotropic polypeptide (GIP) and glucagon-like peptide-1 (GLP-1) receptors. The present invention also relates to compounds having an extended duration of action at each of these receptors. Furthermore, the present invention relates to compounds that may be administered orally. These compounds may be useful in the treatment of type 2 diabetes mellitus (“T2DM”). Also, the compounds may be useful in the treatment of obesity.

[0002] Over the past several decades, the prevalence of diabetes has continued to rise. T2DM is the most common form of diabetes accounting for approximately 90% of all diabetes. T2DM is characterized by high blood glucose levels associated mainly with insulin resistance. The current standard of care for T2DM includes diet and exercise, treatment with oral medications, and injectable glucose lowering drugs, including incretin-based therapies, such as GLP-1 receptor agonists. A variety of GLP-1 receptor agonists are currently available for treatment of T2DM, although currently marketed GLP-1 receptor agonists are generally dose-limited by gastrointestinal side effects such as nausea and vomiting. Subcutaneous injection is the typical route of administration for the available GLP-1 receptor agonists. When treatment with oral medications and incretin-based therapies are insufficient, insulin treatment is considered. Despite the advances in treatment available today, many patients with T2DM are unable to reach their glycemic control goals. Uncontrolled diabetes leads to several conditions associated with increased morbidity and mortality of patients. There is a need for a treatment to enable more patients with T2DM to reach their glycemic treatment goal.

[0003] Obesity is a complex medical disorder resulting in excessive accumulation of adipose tissue mass. Today obesity is a global public health concern that is associated with undesired health outcomes and morbidities. Desired treatments for patients with obesity strive to reduce excess body weight, improve obesity-related co-morbidities, and maintain long-term weight reduction. Available treatments for obesity are particularly unsatisfactory for patients with severe obesity. There is a need for alternative treatment options to induce therapeutic weight loss in patients in need of such treatment.

[0004] WO2016/111971 describes peptides stated to have GLP-1 and GIP activity. WO2013/164483 also discloses compounds stated to have GLP-1 and GIP activity.

[0005] There is a need for T2DM treatments capable of providing effective glucose control for a larger portion of the patients in need of such treatment. There is a further need for T2D treatments capable of providing effective glucose control and with a favorable side effect profile. There is a need for alternate treatment options to provide therapeutic weight loss in a patient in need of such treatment. There is a need for an alternate treatment option for a patient in need of treatment for severe obesity.

[0006] There is a desire for compounds having agonist activity at the GIP and GLP-1 receptors that are suitable for oral administration. Compounds with extended duration of action at each of the GIP and GLP-1 receptors are desirable to allow for less frequent dosing of the compound. Compounds with two acylation modifications in combination with an amino acid sequence to provide GLP-1 and GIP activity from a single compound are desired.

[0007] Accordingly, provided are a compound of Formula I

X₁X₂EGTX₆TSDX₁₀X₁₁X₁₂X₁₃LDX₁₆X₁₇AQX₂₀X₂₁X₂₂IX₂₄X₂₅
LIX₂₈GX₃₀(SEQ ID NO:505)

wherein
[0008] X₁ is selected from the group consisting of Y and R₁Y;
[0009] R₁ is an Ac modification of the N-terminal amino group;
[0010] X₂is Aib;
[0011] X₆ is selected from the group consisting of αMeF and αMeF(2F);
[0012] X₁₀ is selected from the group consisting of 4Pal, Y, αMeF, αMeF(2F), αMeL, αMeV, Ac4c, Ac5c, Ac6c, Bip, 1Nal, 2Nal, OMeY, hTyr, Nle, V, 4CPhe, ChG, ChA, Bzt, 2FA, 4TAA, 2TA, 3TA, and KZ₁;
[0013] X₁₁ is selected from the group consisting of S, αMeS, Aib, G, Dap, Ac5c, and Tle;
[0014] X₁₂ is selected from the group consisting of I and KZ₁;
[0015] X₁₃ is selected from the group consisting of αMeL and αMeF;
[0016] X₁₆ is Orn;
[0017] X₁₇ is selected from the group consisting of Q, I, and KZ₁;
[0018] X₂₀ is selected from the group consisting of Aib, Orn, 4Pal, αMeF, Ac5c, and Ac6c;
[0019] X₂₁ is selected from the group consisting of E, KZ₁, G, Orn, and 4Pal;
[0020] X₂₂ is selected from the group consisting of F, 2ClPhe, 3ClPhe, 2FPhe, 3FPhe, 3,5FPhe, 1Nal, 2Nal, αMeF(2F), ChA, Bzt, and αMeF;
[0021] X₂₄ is selected from the group consisting of D-Glu, E, G, and KZ₁;
[0022] X₂₅ is selected from the group consisting of Y, αMeY, αMeF, and KZ₁;
[0023] X₂₈ is selected from the group consisting of E, Orn, and KZ₁;
[0024] X₃₀ is selected from the group consisting of G, Orn, KZ₁, K(Z₁)R₆, OmR₂, and GR₂;
[0025] R₂ is selected from the group consisting of X₃₁, X₃₁SSG(SEQ ID NO:5), X₃₁SSG-R₃ (SEQ ID NO:6), X₃₁SSGX_{3S}PPPX₃₉ (SEQ ID NO:7), X₃₁SSGX₃₅PPPX₃₉R₃ (SEQ ID NO:8), X₃₁SSGX₃₅PPPX₃₉X₄₀ (SEQ ID NO:9), X₃₁SSGX_{3S}PPPX₃₉X₄₀R₃ (SEQ ID NO:10), and a modification of the c-terminal group wherein the modification is NH₂;
[0026] R₆ is selected from the group consisting of PSSG(SEQ ID NO:506), PSSG-R₃ (SEQ ID NO:507), PSSGX₃₅PPPX₃₉ (SEQ ID NO:508), PSSGX₃₅PPPX₃₉R₃ (SEQ ID NO:509), PSSGX₃₅PPPX₃₉X₄₀ (SEQ ID NO:510), PSSGX₃₅PPPX₃₉X₄₀R₃ (SEQ ID NO:511), and a modification of the c-terminal group wherein the modification is NH₂;
[0027] X₃₁ is selected from the group consisting of P and KZ₁;
[0028] X₃₅ is selected from the group consisting of A and Orn;
[0029] X₃₉ is selected from the group consisting of S and Orn;
[0030] X₄₀ is KZ₁,
[0031] R₃ is a modification of the C-terminal group, wherein the modification is NH₂; wherein two, and only two, of X₁₀, X₁₂, X₁₇, X₂₁, X₂₄, X₂₅, X₂₈, X₃₀, X₃₁, and X₄₀ are KZ₁ or K(Z₁)R₆;
[0032] Z₁ is selected from the group consisting of R₅ and -R₄R₅;
[0033] R₄ is a linker; and
[0034] R₅ is a fatty acid; or
[0035] a pharmaceutically acceptable salt thereof.

[0036] Provided is a compound of Formula II:

X₁X₂EGTX₆TSDX₁₀X₁₁X₁₂X₁₃LDX₁₆X₁₇AQX₂₀X₂₁X₂₂IX₂₄X₂₅
LIX₂₈GX₃₀ (SEQID NO:4)

wherein
[0037] X₁ is selected from the group consisting of Y and R₁Y;
[0038] R₁ is an Ac modification of the N-terminal amino group;
[0039] X₂ is Aib;
[0040] X₆ is selected from the group consisting of αMeF and αMeF(2F);
[0041] X₁₀ is selected from the group consisting of 4Pal, Y, αMeF, αMeF(2F), αMeL, αMeV, Ac4c, Ac5c, Ac6c, Bip, 1Nal, 2Nal, OMeY, hTyr, Nle, V, 4CPhe, ChG, ChA, Bzt, 2FA, 4TAA, 2TA, 3TA, and KZ₁;
[0042] X₁₁ is selected from the group consisting of Ac5c, S, αMeS, Aib, G, Dap, and Tle;
[0043] X₁₂ is selected from the group consisting of I and KZ₁;
[0044] X₁₃ is selected from the group consisting of αMeL and αMeF;
[0045] X₁₆ is Orn;
[0046] X₁₇ is selected from the group consisting of Q, I, and KZ₁;
[0047] X₂₀ is selected from the group consisting of Aib, Orn, 4Pal, αMeF, Ac5c, and Ac6c;
[0048] X₂₁ is selected from the group consisting of E, KZ₁, G, Orn, and 4Pal;
[0049] X₂₂ is selected from the group consisting of F, 2ClPhe, 3ClPhe, 2FPhe, 3FPhe, 3,5FPhe, 1Nal, 2Nal, αMeF(2F), ChA, Bzt, and αMeF;
[0050] X₂₄ is selected from the group consisting of D-Glu, E, G, and KZ₁;
[0051] X₂₅ is selected from the group consisting of Y, αMeY, αMeF, and KZ₁;
[0052] X₂₈ is selected from the group consisting of E, Orn, and KZ₁;
[0053] X₃₀ is selected from the group consisting of G, Orn, KZ₁, and GR₂;
[0054] R₂ is selected from the group consisting of X₃₁SSG (SEQ ID NO:5), X₃₁SSG-R₃ (SEQ ID NO:6), X₃₁SSGX₃₅PPPX₃₉ (SEQ ID NO:7), X₃₁SSGX₃₅PPPX₃₉R₃ (SEQ ID NO:8), X₃₁SSGX₃₅PPPX₃₉X₄₀ (SEQ ID NO:9), X₃₁SSGX_{3S}PPPX₃₉X₄₀R₃ (SEQ ID NO: 10), and a modification of the c-terminal group wherein the modification is NH₂;
[0055] X₃₁ is selected from the group consisting of P and KZ₁;
[0056] X₃₅ is selected from the group consisting of A and Orn;
[0057] X₃₉ is selected from the group consisting of S and Orn;
[0058] X₄₀ is KZ₁,
[0059] R₃ is a modification of the C-terminal group, wherein the modification is NH₂; wherein two, and only two, of X₁₀, X₁₂, X₁₇, X₂₁, X₂₄, X₂₅, X₂₈, X₃₀, X₃₁, and X₄₀ are KZ₁;
[0060] Z₁ is selected from the group consisting of R₅ and -R₄R₅; and
[0061] R₄ is a linker;
[0062] R₅ is a fatty acid; or
[0063] a pharmaceutically acceptable salt thereof.

[0064] Provided is a peptide of Formula I, or a pharmaceutically acceptable salt thereof, wherein Z₁ is selected from the group consisting of
[0065] -(2-[2-(2-Amino-ethoxy)-ethoxy]-acetyl)₂-(γ-Glu)-CO-(CH₂)₁₂-CO₂H,
[0066] -(2-[2-(2-Amino-ethoxy)-ethoxy]-acetyl)₂-(γ-Glu)-CO-(CH₂)₁₀-CO₂H,
[0067] -(2-[2-(2-Amino-ethoxy)-ethoxy]-acetyl)₂-(y-Glu)-(10-(4-carboxyphenoxy)decanoyl),
[0068] -(2-[2-(2-Amino-ethoxy)-ethoxy]-acetyl)₂-(γ-Glu)-(4-(4-iodophenyl)butanoyl),
[0069] -(2-[2-(2-Amino-ethoxy)-ethoxy]-acetyl)₂-(γ-Glu)-(4-(4-tert-butylphenyl)butanoyl),
[0070] -(2-[2-(2-Amino-ethoxy)-ethoxy]-acetyl)₂-(γ-Glu)-CO-(CH₂)₁₄-CH₃,
[0071] -(2-[2-(2-Amino-ethoxy)-ethoxy]-acetyl)₂-(γ-Glu)-CO-(CH₂)₁₂-CH₃,
[0072] -(2-[2-(2-Amino-ethoxy)-ethoxy]-acetyl)₂-(γ-Glu)-CO-(CH₂)io-CH₃,
[0073] -(2-[2-(2-Amino-ethoxy)-ethoxy]-acetyl)₂-CO-(CH₂)₁₂-CO₂H,
[0074] -(2-[2-(2-Amino-ethoxy)-ethoxy]-acetyl)₂-(10-(4-carboxyphenoxy)decanoyl),
[0075] -(2-[2-(2-Amino-ethoxy)-ethoxy]-acetyl)-(γ-Glu)-CO-(CH₂)₁₂-CO₂H,
[0076] -(2-[2-(2-Amino-ethoxy)-ethoxy]-acetyl)-(γ-Glu)-(10-(4-carboxyphenoxy)decanoyl),
[0077] -(2-[2-(2-Amino-ethoxy)-ethoxy]-acetyl)-(γ-Glu)-CO-(CH₂)₁₄-CH₃,
[0078] -(2-[2-(2-Amino-ethoxy)-ethoxy]-acetyl)-(γ-Glu)-CO-(CH₂)io-CH₃,
[0079] -(2-[2-(2-Amino-ethoxy)-ethoxy]-acetyl)₃-(γ-Glu)-CO-(CH₂)₁₂-CO₂H,
[0080] -(2-[2-(2-Amino-ethoxy)-ethoxy]-acetyl)₃-(γ-Glu)-CO-(CH₂)₁₄-CH₃,
[0081] -(2-[2-(2-Amino-ethoxy)-ethoxy]-acetyl)₂-(εK)-CO-(CH₂)₁₂-CO₂H,
[0082] -(2-[2-(2-Amino-ethoxy)-ethoxy]-acetyl)₂-(εK)-(γ-Glu)-CO-(CH₂)₁₂-CO₂H,
[0083] -(2-[2-(2-Amino-ethoxy)-ethoxy]-acetyl)-(εK)-(γ-Glu)-CO-(CH₂)₁₂-CO₂H,
[0084] -(εK)-(2-[2-(2-Amino-ethoxy)-ethoxy]-acetyl)-(γ-Glu)-CO-(CH₂)₁₂-CO₂H,
[0085] -(εK)-(2-[2-(2-Amino-ethoxy)-ethoxy]-acetyl)₂-(y-Glu)-CO-(CH₂)₁₂-CO₂H,
[0086] -(εK)-(γ-Glu)-CO-(CH₂)₁₂-CO₂H,
[0087] -(εK)-(γ-Glu)-(γ-Glu)-CO-(CH₂)₁₂-CO₂H,
[0088] -(γ-Glu)-(2-[2-(2-Amino-ethoxy)-ethoxy]-acetyl)₂-CO-(CH₂)₁₂-CO₂H,
[0089] -(εK)-(εK)-(γ-Glu)-CO-(CH₂)₁₂-CO₂H,
[0090] -(γ-Glu)-(2-[2-(2-Amino-ethoxy)-ethoxy]-acetyl)-CO-(CH₂)₁₂-CO₂H,
[0091] -(2-[2-(2-Amino-ethoxy)-ethoxy]-acetyl)-(γ-Glu)-(2-[2-(2-Amino-ethoxy)-ethoxy]-acetyl)-CO-(CH₂)₁₂-CO₂H,
[0092] -(2-[2-(2-Amino-ethoxy)-ethoxy]-acetyl)₂-(γ-Glu)-(7-(4-carboxyphenoxy)heptanoyl),
[0093] -(2-[2-(2-Amino-ethoxy)-ethoxy]-acetyl)₂-(γ-Glu)-(8-(4-carboxyphenoxy)octanoyl),
[0094] -(2-[2-(2-Amino-ethoxy)-ethoxy]-acetyl)-(γ-Glu)-(4-(4-tert-butylphenyl)butanoyl),
[0095] -(2-[2-(2-Amino-ethoxy)-ethoxy]-acetyl)₂-(γ-Glu)-(ll-(4-carboxyphenoxy)undecanoyl),
[0096] -(2-[2-(2-Amino-ethoxy)-ethoxy]-acetyl)₃-(γ-Glu)-(10-(4-carboxyphenoxy)decanoyl),
[0097] -(2-[2-(2-Amino-ethoxy)-ethoxy]-acetyl)₂-(γ-Glu)-(2-[2-(2-Amino-ethoxy)-ethoxy]-acetyl)-CO-(CH₂)₁₂-CO₂H,
[0098] -(2-[2-(2-Amino-ethoxy)-ethoxy]-acetyl)-(y-Glu)-(2-[2-(2-Amino-ethoxy)-ethoxy]-acetyl)₂-CO-(CH₂)₁₂-CO₂H,
[0099] -PEG3-(γ-Glu)-CO-(CH₂)₁₂-CO₂H,
[0100] -PEG4-(γ-Glu)-CO-(CH₂)₁₂-CO₂H,
[0101] -(2-[2-(2-Amino-ethoxy)-ethoxy]-acetyl)₃-(γ-Glu)-CO-(CH₂)₁₀-CH₃,
[0102] -(2-[2-(2-Amino-ethoxy)-ethoxy]-acetyl)₂-(γ-Glu)-(11-(4-carboxyphenoxy)undecanoyl,
[0103] -(2-[2-(2-Amino-ethoxy)-ethoxy]-acetyl)₂-(γ-Glu)-CO-(CH₂)₁₄-CO₂H,
[0104] -(2-[2-(2-Amino-ethoxy)-ethoxy]-acetyl)-Ahx-(γ-Glu)-CO-(CH₂)₁₂-CO₂H,
[0105] -(2-[2-(2-Amino-ethoxy)-ethoxy]-acetyl)-Aoc-(γ-Glu)-CO-(CH₂)₁₂-CO₂H,
[0106] -Ahx-(2-[2-(2-Amino-ethoxy)-ethoxy]-acetyl)-(γ-Glu)-CO-(CH₂)₁₂-CO₂H,
[0107] -Aoc-(2-[2-(2-Amino-ethoxy)-ethoxy]-acetyl)-(γ-Glu)-CO-(CH₂)₁₂-CO₂H,
[0108] -(2-[2-(2-Amino-ethoxy)-ethoxy]-acetyl)-Ahx-(γ-Glu)-(10-(4-carboxyphenoxy)decanoyl),
[0109] -(2-[2-(2-Amino-ethoxy)-ethoxy]-acetyl)-Aoc-(γ-Glu)-(10-(4-carboxyphenoxy)decanoyl),
[0110] -Ahx-(2-[2-(2-Amino-ethoxy)-ethoxy]-acetyl)-(γ-Glu)-(10-(4-carboxyphenoxy)decanoyl),
[0111] -Aoc-(2-[2-(2-Amino-ethoxy)-ethoxy]-acetyl)-(γ-Glu)-(10-(4-carboxyphenoxy)decanoyl),
[0112] -PEG4-(γ-Glu)-(10-(4-carboxyphenoxy)decanoyl),
[0113] -PEG3-(γ-Glu)-(10-(4-carboxyphenoxy)decanoyl),
[0114] -(2-[2-(2-Amino-ethoxy)-ethoxy]-acetyl)-Aoc-CO-(CH₂)₁₂-CO₂H,
[0115] -PEG6-(γ-Glu)-CO-(CH₂)₁₂-CO₂H,
[0116] -PEG5-(γ-Glu)-CO-(CH₂)₁₂-CO₂H,
[0117] -PEG6-(γ-Glu)-(10-(4-carboxyphenoxy)decanoyl),
[0118] -PEG5-(γ-Glu)-(10-(4-carboxyphenoxy)decanoyl),
[0119] -(2-[2-(2-Amino-ethoxy)-ethoxy]-acetyl)₂-Trx-(γ-Glu)-CO-(CH₂)₁₂-CO₂H,
[0120] -(2-[2-(2-Amino-ethoxy)-ethoxy]-acetyl)₂-Trx-(γ-Glu)-(10-(4-carboxyphenoxy)decanoyl),
[0121] -(2-[2-(2-Amino-ethoxy)-ethoxy]-acetyl)-Trx-(γ-Glu)-CO-(CH₂)₁₂-CO₂H,
[0122] -(2-[2-(2-Amino-ethoxy)-ethoxy]-acetyl)-Trx-(γ-Glu)-(10-(4-carboxyphenoxy)decanoyl),
[0123] -(2-[2-(2-Amino-ethoxy)-ethoxy]-acetyl)₂-(γ-Glu)₂-CO-(CH₂)₁₂-CO₂H,
[0124] -(2-[2-(2-Amino-ethoxy)-ethoxy]-acetyl)₂-(γ-Glu)₂-(10-(4-carboxyphenoxy)decanoyl),
[0125] -(γ-Glu)-(2-[2-(2-Amino-ethoxy)-ethoxy]-acetyl)₂-(γ-Glu)-CO-(CH₂)₁₂-CO₂H,
[0126] -(γ-Glu)-(2-[2-(2-Amino-ethoxy)-ethoxy]-acetyl)₂-(γ-Glu)-(10-(4-carboxyphenoxy)decanoyl),
[0127] -(2-[2-(2-Amino-ethoxy)-ethoxy]-acetyl)-(γ-Glu)-(2-[2-(2-Amino-ethoxy)-ethoxy]-acetyl)-(γ-Glu)-CO-(CH₂)₁₂-CO₂H, and
[0128] -(2-[2-(2-Amino-ethoxy)-ethoxy]-acetyl)-(γ-Glu)-(2-[2-(2-Amino-ethoxy)-ethoxy]-acetyl)-(γ-Glu)-(10-(4-carboxyphenoxy)decanoyl).

[0129] Provided is a peptide of Formula I, or a pharmaceutically acceptable salt thereof, wherein Z₁ is selected from the group consisting of
[0130] -(2-[2-(2-Amino-ethoxy)-ethoxy]-acetyl)₂-(γ-Glu)-CO-(CH₂)₁₂-CO₂H,
[0131] -(2-[2-(2-Amino-ethoxy)-ethoxy]-acetyl)₂-(γ-Glu)-CO-(CH₂)₁₀-CO₂H,
[0132] -(2-[2-(2-Amino-ethoxy)-ethoxy]-acetyl)₂-(γ-Glu)-(10-(4-carboxyphenoxy)decanoyl),
[0133] -(2-[2-(2-Amino-ethoxy)-ethoxy]-acetyl)₂-(γ-Glu)-(4-(4-iodophenyl)butanoyl),
[0134] -(2-[2-(2-Amino-ethoxy)-ethoxy]-acetyl)₂-(γ-Glu)-(4-(4-tert-butylphenyl)butanoyl),
[0135] -(2-[2-(2-Amino-ethoxy)-ethoxy]-acetyl)₂-(γ-Glu)-CO-(CH₂)₁₄-CH₃,
[0136] -(2-[2-(2-Amino-ethoxy)-ethoxy]-acetyl)₂-(γ-Glu)-CO-(CH₂)₁₂-CH₃,
[0137] -(2-[2-(2-Amino-ethoxy)-ethoxy]-acetyl)₂-(γ-Glu)-CO-(CH₂)io-CH₃,
[0138] -(2-[2-(2-Amino-ethoxy)-ethoxy]-acetyl)₂-CO-(CH₂)₁₂-CO₂H,
[0139] -(2-[2-(2-Amino-ethoxy)-ethoxy]-acetyl)₂-(10-(4-carboxyphenoxy)decanoyl),
[0140] -(2-[2-(2-Amino-ethoxy)-ethoxy]-acetyl)-(γ-Glu)-CO-(CH₂)₁₂-CO₂H,
[0141] -(2-[2-(2-Amino-ethoxy)-ethoxy]-acetyl)-(γ-Glu)-(10-(4-carboxyphenoxy)decanoyl),
[0142] -(2-[2-(2-Amino-ethoxy)-ethoxy]-acetyl)-(γ-Glu)-CO-(CH₂)₁₄-CH₃,
[0143] -(2-[2-(2-Amino-ethoxy)-ethoxy]-acetyl)-(γ-Glu)-CO-(CH₂)io-CH₃,
[0144] -(2-[2-(2-Amino-ethoxy)-ethoxy]-acetyl)₃-(γ-Glu)-CO-(CH₂)₁₂-CO₂H,
[0145] -(2-[2-(2-Amino-ethoxy)-ethoxy]-acetyl)₃-(γ-Glu)-CO-(CH₂)₁₄-CH₃,
[0146] -(2-[2-(2-Amino-ethoxy)-ethoxy]-acetyl)₂-(εK)-CO-(CH₂)₁₂-CO₂H,
[0147] -(2-[2-(2-Amino-ethoxy)-ethoxy]-acetyl)₂-(εK)-(γ-Glu)-CO-(CH₂)₁₂-CO₂H,
[0148] -(2-[2-(2-Amino-ethoxy)-ethoxy]-acetyl)-(εK)-(γ-Glu)-CO-(CH₂)₁₂-CO₂H,
[0149] -(εK)-(2-[2-(2-Amino-ethoxy)-ethoxy]-acetyl)-(γ-Glu)-CO-(CH₂)₁₂-CO₂H,
[0150] -(sK)-(2-[2-(2-Amino-ethoxy)-ethoxy]-acetyl)₂-(γ-Glu)-CO-(CH₂)i₂-CO₂H,
[0151] -(εK)-(γ-Glu)-CO-(CH₂)₁₂-CO₂H,
[0152] -(εK)-(γ-Glu)-(γ-Glu)-CO-(CH₂)₁₂-CO₂H,
[0153] -(γ-Glu)-(2-[2-(2-Amino-ethoxy)-ethoxy]-acetyl)₂-CO-(CH₂)₁₂-CO₂H,
[0154] -(εK)-(εK)-(γ-Glu)-CO-(CH₂)₁₂-CO₂H,
[0155] -(γ-Glu)-(2-[2-(2-Amino-ethoxy)-ethoxy]-acetyl)-CO-(CH₂)₁₂-CO₂H
[0156] -(2-[2-(2-Amino-ethoxy)-ethoxy]-acetyl)-(γ-Glu)-(2-[2-(2-Amino-ethoxy)-ethoxy]-acetyl)-CO-(CH₂)₁₂-CO₂H,
[0157] -(2-[2-(2-Amino-ethoxy)-ethoxy]-acetyl)₂-(γ-Glu)-(7-(4-carboxyphenoxy)heptanoyl),
[0158] -(2-[2-(2-Amino-ethoxy)-ethoxy]-acetyl)₂-(γ-Glu)-(8-(4-carboxyphenoxy)octanoyl), and
[0159] -(2-[2-(2-Amino-ethoxy)-ethoxy]-acetyl)-(γ-Glu)-(4-(4-tert-butylphenyl)butanoyl).

[0160] Provided is a peptide of Formula I, or a pharmaceutically acceptable salt thereof, wherein Z₁ is selected from the group consisting of
[0161] -(2-[2-(2-Amino-ethoxy)-ethoxy]-acetyl)₂-(γ-Glu)-CO-(CH₂)₁₂-CO₂H,
[0162] -(2-[2-(2-Amino-ethoxy)-ethoxy]-acetyl)₂-(γ-Glu)-CO-(CH₂)₁₀-CO₂H,
[0163] -(2-[2-(2-Amino-ethoxy)-ethoxy]-acetyl)₂-(γ-Glu)-(10-(4-carboxyphenoxy)decanoyl),
[0164] -(2-[2-(2-Amino-ethoxy)-ethoxy]-acetyl)₂-(γ-Glu)-(4-(4-iodophenyl)butanoyl),
[0165] -(2-[2-(2-Amino-ethoxy)-ethoxy]-acetyl)₂-(γ-Glu)-(4-(4-tert-butylphenyl)butanoyl),
[0166] -(2-[2-(2-Amino-ethoxy)-ethoxy]-acetyl)₂-(γ-Glu)-CO-(CH₂)₁₄-CH₃,
[0167] -(2-[2-(2-Amino-ethoxy)-ethoxy]-acetyl)₂-(γ-Glu)-CO-(CH₂)₁₂-CH₃,
[0168] -(2-[2-(2-Amino-ethoxy)-ethoxy]-acetyl)₂-(γ-Glu)-CO-(CH₂)io-CH₃,
[0169] -(2-[2-(2-Amino-ethoxy)-ethoxy]-acetyl)₂-CO-(CH₂)₁₂-CO₂H,
[0170] -(2-[2-(2-Amino-ethoxy)-ethoxy]-acetyl)₂-(10-(4-carboxyphenoxy)decanoyl),
[0171] -(2-[2-(2-Amino-ethoxy)-ethoxy]-acetyl)-(γ-Glu)-CO-(CH₂)₁₂-CO₂H,
[0172] -(2-[2-(2-Amino-ethoxy)-ethoxy]-acetyl)-(γ-Glu)-(10-(4-carboxyphenoxy)decanoyl),
[0173] -(2-[2-(2-Amino-ethoxy)-ethoxy]-acetyl)-(γ-Glu)-CO-(CH₂)₁₄-CH₃,
[0174] -(2-[2-(2-Amino-ethoxy)-ethoxy]-acetyl)-(γ-Glu)-CO-(CH₂)io-CH₃,
[0175] -(2-[2-(2-Amino-ethoxy)-ethoxy]-acetyl)₃-(γ-Glu)-CO-(CH₂)₁₂-CO₂H,
[0176] -(2-[2-(2-Amino-ethoxy)-ethoxy]-acetyl)₃-(γ-Glu)-CO-(CH₂)₁₄-CH₃,
[0177] -(2-[2-(2-Amino-ethoxy)-ethoxy]-acetyl)₂-(εK)-CO-(CH₂)₁₂-CO₂H,
[0178] -(2-[2-(2-Amino-ethoxy)-ethoxy]-acetyl)₂-(εK)-(γ-Glu)-CO-(CH₂)₁₂-CO₂H,
[0179] -(2-[2-(2-Amino-ethoxy)-ethoxy]-acetyl)-(εK)-(γ-Glu)-CO-(CH₂)₁₂-CO₂H,
[0180] -(εK)-(2-[2-(2-Amino-ethoxy)-ethoxy]-acetyl)-(γ-Glu)-CO-(CH₂)₁₂-CO₂H,
[0181] -(sK)-(2-[2-(2-Amino-ethoxy)-ethoxy]-acetyl)₂-(y-Glu)-CO-(CH₂)i₂-CO₂H,
[0182] -(εK)-(γ-Glu)-CO-(CH₂)₁₂-CO₂H,
[0183] -(εK)-(γ-Glu)-(γ-Glu)-CO-(CH₂)₁₂-CO₂H,
[0184] -(γ-Glu)-(2-[2-(2-Amino-ethoxy)-ethoxy]-acetyl)₂-CO-(CH₂)₁₂-CO₂H,
[0185] -(εK)-(εK)-(γ-Glu)-CO-(CH₂)₁₂-CO₂H,
[0186] -(γ-Glu)-(2-[2-(2-Amino-ethoxy)-ethoxy]-acetyl)-CO-(CH₂)₁₂-CO₂H,
[0187] -(2-[2-(2-Amino-ethoxy)-ethoxy]-acetyl)-(γ-Glu)-(2-[2-(2-Amino-ethoxy)-ethoxy]-acetyl)-CO-(CH₂)₁₂-CO₂H,
[0188] -(2-[2-(2-Amino-ethoxy)-ethoxy]-acetyl)₂-(γ-Glu)-(7-(4-carboxyphenoxy)heptanoyl),
[0189] -(2-[2-(2-Amino-ethoxy)-ethoxy]-acetyl)₂-(γ-Glu)-(8-(4-carboxyphenoxy)octanoyl), and
[0190] -(2-[2-(2-Amino-ethoxy)-ethoxy]-acetyl)-(γ-Glu)-(4-(4-tert-butylphenyl)butanoyl).

[0191] Provided is a compound of Formula I, or a pharmaceutically acceptable salt thereof, wherein R₅ is selected from the group consisting of —CO—(CH₂)₁₂—CO₂H, —CO—(CH₂)₁₀—CO₂H, -(10-(4-carboxyphenoxy)decanoyl), -(4-(4-iodophenyl)butanoyl), -(4-(4-tert-butylphenyl)butanoyl), —CO—(CH₂)₁₄—CH₃, —CO—(CH₂)₁₂—CH₃, —CO—(CH₂)₁₀—CH₃, -(7-(4-carboxyphenoxy)heptanoyl), -(8-(4-carboxyphenoxy)octanoyl), (11-(4-carboxyphenoxy)undecanoyl), -(12-(4-carboxyphenoxy)dodecanoyl), and CO—(CH₂)₁₁—CO₂H.

[0192] Provided is a compound of Formula I, or a pharmaceutically acceptable salt thereof, wherein R₅ is selected from the group consisting of —CO—(CH₂)₁₂—CO₂H, —CO—(CH₂)₁₀—CO₂H, -(10-(4-carboxyphenoxy)decanoyl), -(4-(4-iodophenyl)butanoyl), -(4-(4-tert-butylphenyl)butanoyl), —CO—(CH₂)₁₄—CH₃, —CO—(CH₂)₁₂—CH₃, —CO—(CHz)₁₀—CH₃, -(7-(4-carboxyphenoxy)heptanoyl), and -(8-(4-carboxyphenoxy)octanoyl).

[0193] Provided is a compound of Formula I, or a pharmaceutically acceptable salt thereof, wherein R₄ is selected from the group consisting of
[0194] -(2-[2-(2-Amino-ethoxy)-ethoxy]-acetyl)₂-(γ-Glu)-,
[0195] -(2-[2-(2-Amino-ethoxy)-ethoxy]-acetyl)₂-,
[0196] -(2-[2-(2-Amino-ethoxy)-ethoxy]-acetyl)-(γ-Glu)-,
[0197] -(2-[2-(2-Amino-ethoxy)-ethoxy]-acetyl)₂-(γ-Glu)₂)-,
[0198] -(2-[2-(2-Amino-ethoxy)-ethoxy]-acetyl)₃-(γ-Glu)-,
[0199] -(2-[2-(2-Amino-ethoxy)-ethoxy]-acetyl)₂-(εK)-,
[0200] -(2-[2-(2-Amino-ethoxy)-ethoxy]-acetyl)₂-(εK)-(γ-Glu)-,
[0201] -(2-[2-(2-Amino-ethoxy)-ethoxy]-acetyl)-(εK)-(γ-Glu)-,
[0202] -(2-[2-(2-Amino-ethoxy)-ethoxy]-acetyl)-Trx-(γ-Glu)-,
[0203] -(2-[2-(2-Amino-ethoxy)-ethoxy]-acetyl)₂-Trx-(γ-Glu)-,
[0204] -(2-[2-(2-Amino-ethoxy)-ethoxy]-acetyl)-Aoc-,
[0205] -(2-[2-(2-Amino-ethoxy)-ethoxy]-acetyl)-Aoc-(γ-Glu)-,
[0206] -(2-[2-(2-Amino-ethoxy)-ethoxy]-acetyl)-Ahx-(γ-Glu)-,
[0207] -PEG3-(γ-Glu)-,
[0208] -PEG4-(γ-Glu)-,
[0209] -PEG5-(γ-Glu)-,
[0210] -PEG6-(γ-Glu)-,
[0211] -Ahx-(2-[2-(2-Amino-ethoxy)-ethoxy]-acetyl)-(γ-Glu)-,
[0212] -Aoc-(2-[2-(2-Amino-ethoxy)-ethoxy]-acetyl)-(γ-Glu)-,
[0213] -(εK)-(2-[2-(2-Amino-ethoxy)-ethoxy]-acetyl)-(γ-Glu)-,
[0214] -(εK)-(2-[2-(2-Amino-ethoxy)-ethoxy]-acetyl)₂-(γ-Glu)-,
[0215] -(εK)-(γ-Glu)-,
[0216] -(εK)-(γ-Glu)-(γ-Glu)-,
[0217] -(γ-Glu)-(2-[2-(2-Amino-ethoxy)-ethoxy]-acetyl)₂-,
[0218] -(εK)-(eK)-(γ-Glu)-,
[0219] -(γ-Glu)-(2-[2-(2-Amino-ethoxy)-ethoxy]-acetyl)-,
[0220] -(γ-Glu)-(2-[2-(2-Amino-ethoxy)-ethoxy]-acetyl)₂-(γ-Glu)-,
[0221] -(2-[2-(2-Amino-ethoxy)-ethoxy]-acetyl)-(γ-Glu)-(2-[2-(2-Amino-ethoxy)-ethoxy]-acetyl)-,
[0222] -(2-[2-(2-Amino-ethoxy)-ethoxy]-acetyl)₂-(γ-Glu)-(2-[2-(2-Amino-ethoxy)-ethoxy]-acetyl)-,
[0223] -(2-[2-(2-Amino-ethoxy)-ethoxy]-acetyl)-(γ-Glu)-(2-[2-(2-Amino-ethoxy)-ethoxy]-acetyl)₂-, and
[0224] (2-[2-(2-Amino-ethoxy)-ethoxy]-acetyl)-(γ-Glu)-(2-[2-(2-Amino-ethoxy)-ethoxy]-acetyl)-(γ-Glu)-.

[0225] Provided is a compound of Formula I, or a pharmaceutically acceptable salt thereof, wherein R₄ is selected from the group consisting of
[0226] -(2-[2-(2-Amino-ethoxy)-ethoxy]-acetyl)₂-(γ-Glu)-.
[0227] -(2-[2-(2-Amino-ethoxy)-ethoxy]-acetyl)₂-,
[0228] -(2-[2-(2-Amino-ethoxy)-ethoxy]-acetyl)-(γ-Glu)-,
[0229] -(2-[2-(2-Amino-ethoxy)-ethoxy]-acetyl)₃-(γ-Glu)-,
[0230] -(2-[2-(2-Amino-ethoxy)-ethoxy]-acetyl)₂-(εK)-,
[0231] -(2-[2-(2-Amino-ethoxy)-ethoxy]-acetyl)₂-(εK)-(y-Glu)-,
[0232] -(2-[2-(2-Amino-ethoxy)-ethoxy]-acetyl)-(εK)-(γ-Glu)-,
[0233] -(εK)-(2-[2-(2-Amino-ethoxy)-ethoxy]-acetyl)-(γ-Glu)-,
[0234] -(εK)-(2-[2-(2-Amino-ethoxy)-ethoxy]-acetyl)₂-(γ-Glu)-,
[0235] -(εK)-(γ-Glu)-,
[0236] -(εK)-(γ-Glu)-(γ-Glu)-,
[0237] -(γ-Glu)-(2-[2-(2-Amino-ethoxy)-ethoxy]-acetyl)₂-,
[0238] -(εK)-(εK)-(γ-Glu)-,
[0239] -(y-Glu)-(2-[2-(2-Amino-ethoxy)-ethoxy]-acetyl)-, and
[0240] -(2-[2-(2-Amino-ethoxy)-ethoxy]-acetyl)-(y-Glu)-(2-[2-(2-Amino-ethoxy)-ethoxy]-acetyl)-.

[0241] Provided is a compound of Formula I, or a pharmaceutically acceptable salt thereof, wherein X₁₇ and X₃₁ are each KZ₁. Provided is a compound of Formula I, or a pharmaceutically acceptable salt thereof, wherein X₁₇ and X₂₄ are each KZ₁. Provided is a compound of Formula I, or a pharmaceutically acceptable salt thereof, wherein X₁₇ and X₂₁ are each KZ₁. Provided is a compound of Formula I, or a pharmaceutically acceptable salt thereof, wherein X₁₇ and X₂₈ are each KZ₁. Provided is a compound of Formula I, or a pharmaceutically acceptable salt thereof, wherein X₁₇ and X₄₀ are each KZ₁. Provided is a compound of Formula I, or a pharmaceutically acceptable salt thereof, wherein X₂₁ and X₄₀ are each KZ₁. Provided is a compound of Formula I, or a pharmaceutically acceptable salt thereof, wherein X₂₁ and X₂₈ are each KZ₁. Provided is a compound of Formula I, or a pharmaceutically acceptable salt thereof, wherein X₂₄ and X₂₈ are each KZ₁.

[0242] Provided is a compound of Formula I, or a pharmaceutically acceptable salt thereof, wherein X₁ is Y; X₆ is αMeF(2F);X₁₀ is selected from the group consisting of 4Pal, Y, and KZ₁; X₁₁ is selected from the group consisting of S, αMeS, and Aib; X₁₂ is I; X₁₃ is αMeL; X₁₆ is Orn; X₁₇ is selected from the group consisting of I and KZ₁; X₂₀ is Aib; X₂₁ is selected from the group consisting of KZ₁ and E; X₂₂ is selected from the group consisting of F and αMeF;X₂₄ is selected from the group consisting of D-Glu, and KZ₁; X₂₅ is αMeY; X₂₈ is selected from the group consisting of E and KZ₁; X₃₀ is selected from the group consisting of G and GR₂; R₂ is selected from the group consisting of X₃₁SSGX₃₅PPPX₃₉ (SEQ ID NO:7), X₃₁SSGX₃₅PPPX₃₉R₃ (SEQ ID NO:8), and X₃₁SSGX₃₅PPPX₃₉X₄₀ (SEQ ID NO:9), and a modification of the c-terminal group wherein the modification is NH₂; X₃₁ is selected from the group consisting of P and KZ₁; X₃₅ is selected from the group consisting of A and Orn; X₃₉ is selected from the group consisting of S, Orn; X₄₀ is selected from the group consisting of KZ₁; R₃ is a modification of the C-terminal group, wherein the modification is NH₂; wherein one, and only one, selected from the group consisting of X₁₀, X₁₇, X₂₁, X₂₄, X₂₈, and X₃₁ is KZ₁; Z₁ is -R₄R₅; R₄ is a linker; and R₅ is a fatty acid; or a pharmaceutically acceptable salt thereof.

[0243] Provided is a compound of Formula I, or a pharmaceutically acceptable salt thereof, wherein the compound is selected from the group consisting of
[0244] Y-Aib-EGT-αMeF(2F)-TSD-4Pal-SI-αMeL-LD-Orn-K((2-[2-(2-Amino-ethoxy)-ethoxy]-acetyl)₂-(γ-Glu)-CO-(CH₂)₁₂-CO₂H)AQ-Aib-EFI-(D-Glu)-αMeY-LIEGGK((2-[2-(2-Amino-ethoxy)-ethoxy]-acetyl)₂-(γ-Glu)-CO-(CH₂)₁₂-CO₂H)SSGAPPPS-NH₂,
[0245] Y-Aib-EGT-αMeF(2F)-TSD-4Pal-SI-αMeL-LD-Om-K((2-[2-(2-Amino-ethoxy)-ethoxy]-acetyl)₂-(γ-Glu)-(10-(4-carboxyphenoxy)decanoyl))AQ-Aib-EFI-(D-Glu)-αMeY-LIEGGK((2-[2-(2-Amino-ethoxy)-ethoxy]-acetyl)₂-(γ-Glu)-(10-(4-carboxyphenoxy)decanoyl))SSGAPPPS-NH₂,
[0246] Y-Aib-EGT-αMeF(2F)-TSD-4Pal-SI-αMeL-LD-Orn-K((2-[2-(2-Amino-ethoxy)-ethoxy]-acetyl)₂-(γ-Glu)-(4-(4-iodophenyl)butanoyl))AQ-Aib-EFI-(D-Glu)-αMeY-LIEGGK((2-[2-(2-Amino-ethoxy)-ethoxy]-acetyl)₂-(γ-Glu)-(4-(4-iodophenyl)butanoyl))SSGAPPPS-NH₂,
[0247] Y-Aib-EGT-αMeF(2F)-TSD-4Pal-SI-aMeL-LD-Orn-K((2-[2-(2-Amino-ethoxy)-ethoxy]-acetyl)₂-(γ-Glu)-(4-(4-tert-butylphenyl)butanoyl))AQ-Aib-EFI-(D-Glu)-αMeY-LIEGGK((2-[2-(2-Amino-ethoxy)-ethoxy]-acetyl)₂-(γ-Glu)-(4-(4-tert-butylphenyl)butanoyl))SSGAPPPS-NH₂, and
[0248] Y-Aib-EGT-αMeF(2F)-TSD-4Pal-SI-αMeL-LD-Om-K((2-[2-(2-Amino-ethoxy)-ethoxy]-acetyl)₂-(γ-Glu)-CO-(CH₂)₁₀-CH₃)AQ-Aib-EFI-(D-Glu)-αMeY-LIEGGK((2-[2-(2-Amino-ethoxy)-ethoxy]-acetyl)₂-(γ-Glu)-CO-(CH₂)₁₀-CH₃)SSGAPPPS-NH₂

[0249] In an embodiment the R₄ linker is one to two amino acids selected from the group consisting of εK and γ-Glu. In an embodiment the R₄ linker comprises from one to three (2-[2-(2-Amino-ethoxy)-ethoxy]-acetyl) moieties. In an embodiment, the R₅ fatty acid moieties are conjugated to a lysine via an R₄ linker between the lysine and the R₅ fatty acid.

[0250] In an embodiment is a compound of Formula I, or a pharmaceutically acceptable salt thereof, wherein the R₄ linker comprises from zero to four amino acids; and from zero to three (2-[2-(2-Amino-ethoxy)-ethoxy]-acetyl) moieties. In an embodiment, the R₄ linker comprises from one to three amino acids each independently selected from the group consisting of εK and γ-Glu. In an embodiment, is a compound of Formula I, or a pharmaceutically acceptable salt thereof, wherein the R₄ linker comprises from 1 to 2 amino acids each independently selected from the group consisting of εK and γ-Glu. In an embodiment is a compound of Formula I, or a pharmaceutically acceptable salt thereof, comprising two Z₁ fatty acid moieties wherein each R₅ fatty acid of the Z₁ moiety is conjugated to different lysines of the peptide via an R₄ linker wherein, the R₄ linker comprises from zero to 2 γ-Glu amino acid residues. In an embodiment is a compound of Formula I, or a pharmaceutically acceptable salt thereof, comprising two Z₁ fatty acid moieties wherein each R₅ fatty acid of the Z₁ is conjugated to different lysines of the peptide via an R₄ linker wherein R₄ comprises from one to three amino acids and from one to three (2-[2-(2-Amino-ethoxy)-ethoxy]-acetyl) moieties. In an embodiment is a compound of Formula I, or a pharmaceutically acceptable salt thereof, comprising two of the same Z₁ fatty acid moieties wherein the R₅ fatty acid of the Z₁ is each conjugated to a different lysine of the peptide via an R₄ linker wherein, R₄ comprises from one to three amino acids each independently selected from the group consisting of εK and ɤ-Glu; and from one to three (2-[2-(2-Amino-ethoxy)-ethoxy]-acetyl) moieties attached to the amino acid. In an embodiment is a Formula I compound, or a pharmaceutically acceptable salt thereof, comprising two of the same Z₁ fatty acid moieties wherein the R₅ fatty acid of the Z₁ is each conjugated to different lysines of the peptide via an R₄ linker wherein R₄ comprises up to three amino acids each independently selected from the group consisting of γ-Glu and εK attached to one or two (2-[2-(2-Amino-ethoxy)-ethoxy]-acetyl) moieties.

[0251] In an embodiment is a Formula I compound, or a pharmaceutically acceptable salt thereof, comprising two of the same Z₁ fatty acid moieties wherein the R₅ fatty acid of the Z₁ is each conjugated via an R₄ linker, wherein the R₄ linker has the following formula:
[0252] -(εK)ₐ₁-(γ-Glu)ₐ₂-(2-[2-(2-Amino-ethoxy)-ethoxy]-acetyl)ₐ₃-(εK)_{b1}-(γ-Glu)_{b2}-;
[0253] wherein a1 is selected from the group consisting of 0, 1, and 2; a2 is selected from the group consisting of 0, 1, and 2; a3 is selected from the group consisting of 0, 1, 2, and 3; b1 is 0 or 1; and b2 is 0 or 1. In an embodiment is a Formula I compound, or a pharmaceutically acceptable salt thereof, comprising two of the same Z₁ fatty acid moieties wherein the R₅ fatty acid of the Z₁ is each conjugated via an R₄ linker wherein Z₁ is of the formula:

[chemical structure]

[0254] wherein wherein a1 is selected from the group consisting of 0, 1, and 2; a2 is selected from the group consisting of 0, 1, and 2; a3 is selected from the group consisting of 0, 1, 2, and 3; b1 is 0 or 1; b2 is 0 or 1; and q is selected from the group consisting of 10, 12, 14 and 16.

[0255] In an embodiment, a1 is 1, a2 is 0, a3 is 2, b1 is 0, b2 is 1, and q is 12; and the structure is:

[chemical structure]

[0256] In an embodiment is a Formula I compound, or a pharmaceutically acceptable salt thereof, comprising two of the same Z₁ fatty acid moieties wherein the R₅ fatty acid of the Z₁ is each conjugated via an R₄ linker, wherein the R₄ linker and R₅ fatty acid components have the following formula:

[chemical structure]

wherein q2 is selected from the group consisting of 7, 8, 10, 11, and 12.

[0257] In an embodiment is a Formula I compound, or a pharmaceutically acceptable salt thereof, comprising two of the same Z₁ fatty acid moieties wherein the R₅ fatty acid of the Z₁ is each conjugated via an R₄ linker, wherein the R₅ fatty acid is selected from the group consisting of -(7-(4-carboxyphenoxy)heptanoyl) and -(8-(4-carboxyphenoxy)octanoyl). In an embodiment is a Formula I compound, or a pharmaceutically acceptable salt thereof, comprising two of the same Z₁ fatty acid moieties each conjugated via an R₄ linker, wherein the R₅ fatty acid is selected from the group consisting of -(10-(4-carboxyphenoxy)decanoyl), -(4-(4-iodophenyl)butanoyl), and -(4-(4-tert-butylphenyl)butanoyl).

[0258] In an embodiment is a Formula I compound, or a pharmaceutically acceptable salt thereof, comprising two of the same Z₁ fatty acid moieties each conjugated via an R₄ linker, wherein the R₅ fatty acid is selected from the group consisting of —CO—(CH₂)₁₄—CH₃, —CO—(CH₂)₁₂—CH₃, and —CO—(CH₂)₁₀—CH₃.

[0259] In an embodiment is a Formula I compound, or a pharmaceutically acceptable salt thereof, comprising two of the same Z₁ fatty acid moieties each conjugated via an R₄ linker, wherein the R₅ fatty acid is selected from the group consisting of —CO—(CH₂)₁₂—CO₂H and —CO—(CH₂)₁₀—CO₂H. In an embodiment is a Formula I compound, or a pharmaceutically acceptable salt thereof, comprising two of the same Z₁ fatty acid moieties each conjugated via an R₄ linker, wherein the R₅ fatty acid is selected from the group consisting of —CO—(CH₂)₁₀—CH₃ and —CO—(CH₂)₁₂—CH₃.

[0260] In an embodiment, R₅ fatty acid is selected from the group consisting of —CO—(CH₂)₁₂—CO₂H, —CO—(CH₂)₁₀—CO₂H, -(10-(4-carboxyphenoxy)decanoyl), -(4-(4-iodophenyl)butanoyl), -(4-(4-tert-butylphenyl)butanoyl), —CO—(CH₂)₁₄—CH₃, —CO—(CH₂)₁₂—CH₃, —CO—(CH₂)₁₀—CH₃, -(7-(4-carboxyphenoxy)heptanoyl), and -(8-(4-carboxyphenoxy)octanoyl).

[0261] An embodiment provides a method of treating a condition selected from the group consisting of T2DM, obesity, nonalcoholic fatty liver disease (NAFLD), nonalcoholic steatohepatitis (NASH), dyslipidemia and metabolic syndrome, comprising administering to a subject in need thereof, an effective amount of a compound of Formula I or a pharmaceutically acceptable salt thereof. An embodiment provides a method for providing therapeutic weight loss comprising administering to a subject in need thereof, an effective amount of a compound of Formula I, or a pharmaceutically acceptable salt thereof. In one embodiment, the condition is NAFLD. In one embodiment, the condition is NASH.

[0262] An embodiment provides a compound of Formula I, or a pharmaceutically acceptable salt thereof, for use in therapy. An embodiment provides a compound of Formula I, or a pharmaceutically acceptable salt thereof, for use in the treatment of a condition selected from the group consisting of T2DM, obesity, NAFLD, NASH, dyslipidemia, and metabolic syndrome. In an embodiment, the condition is T2DM. In an embodiment, the condition is obesity. In an embodiment, the condition is NAFLD. In an embodiment, the condition is NASH. In an embodiment, the condition is metabolic syndrome.

[0263] The compounds of Formula I, or a pharmaceutically acceptable salt thereof, may be useful in the treatment of a variety of symptoms or disorders. For example, certain embodiments, provide a method for treatment of T2DM in a patient comprising administering to a subject in need of such treatment an effective amount of a compound of Formula I, or a pharmaceutically acceptable salt thereof. In an embodiment, is a method for treatment of obesity in a patient comprising administering to a subject in need of such treatment an effective amount of a compound of Formula I, or a pharmaceutically acceptable salt thereof. In an embodiment, the method is inducing non-therapeutic weight loss in a subject, comprising administering to a subject in need of such treatment an effective amount of a compound of Formula I, or a pharmaceutically acceptable salt thereof.

[0264] In certain embodiments, the present invention provides a method for treatment of metabolic syndrome in a patient comprising administering to a subject in need of such treatment an effective amount of a compound of Formula I, or a pharmaceutically acceptable salt thereof. In an embodiment, the method is treatment of NASH comprising administering to a subject in need of such treatment an effective amount of a compound of Formula I, or a pharmaceutically acceptable salt thereof.

[0265] Also provided herein is a compound of the present invention for use in simultaneous, separate and sequential combinations with one or more agents selected from metformin, a thiazolidinedione, a sulfonylurea, a dipeptidyl peptidase 4 inhibitor, a sodium glucose co-transporter, a SGLT-2 inhibitor, a growth differentiation factor 15 modulator (“GDF15”), a peptide tyrosine tyrosine modulator (“PYY”), a modified insulin, amylin, a dual amylin calcitonin receptor agonist, and oxyntomodulin agonist (“OXM”) in the treatment of a condition selected from the group consisting of T2DM, obesity, NAFLD, NASH, dyslipidemia and metabolic syndrome. In an embodiment, a compound of the present invention is provided in a fixed dose combination with one or more agents selected from metformin, a thiazolidinedione, a sulfonylurea, a dipeptidyl peptidase 4 inhibitor, a sodium glucose co-transporter, a SGLT-2 inhibitor, GDF15, PYY, a modified insulin, amylin, a dual amylin calcitonin receptor agonist, and OXM. In an embodiment is a compound of the present invention for use in simultaneous, separate and sequential combinations with one or more agents selected from metformin, a thiazolidinedione, a sulfonylurea, a dipeptidyl peptidase 4 inhibitor, a sodium glucose co-transporter, a SGLT-2 inhibitor, GDF15, PYY, a modified insulin, amylin, a dual amylin calcitonin receptor agonist, and OXM in the treatment of a condition selected from the group consisting of T2DM and obesity. In an embodiment is a compound of the present invention for use in simultaneous, separate and sequential combinations with one or more agents selected from metformin, a thiazolidinedione, a sulfonylurea, a dipeptidyl peptidase 4 inhibitor, a sodium glucose co-transporter, and a SGLT-2 inhibitor in the treatment of a condition selected from the group consisting of T2DM and obesity.

[0266] In other embodiments, the compounds, or a pharmaceutically acceptable salt thereof, may be useful to improve bone strength in subjects in need thereof. The compounds of the present invention, or a pharmaceutically acceptable salt thereof, may be useful in the treatment of other disorders such as Parkinson’s disease or Alzheimer’s disease. Incretins and incretin analogs having activity at one or more of the GIP, GLP-1 and/or glucagon receptors have been described as having the potential to have therapeutic value in a number of other diseases or conditions, including for example obesity, NAFLD and NASH, dyslipidemia, metabolic syndrome, bone related disorders, Alzheimer’s disease, and Parkinson’s disease. See, e.g., Jail S., et. al, Monomeric GLP-1/GIP/glucagon triagonism corrects obesity, hepatosteatosis, and dyslipidemia in female mice, MOL. METAB. 6(5):440-446 (March 2017); Carbone L.J., et. al., Incretin-based therapies for the treatment of non-alcoholic fatty liver disease: A systematic review and meta-analysis. J.GASTROENTEROL. HEPATOL., 31(1):23-31 (January 2016); B. Finan, et. al, Reappraisal of GIP Pharmacology for Metabolic Diseases. TRENDS MOL. MED., 22(5):359-76 (May 2016); Choi, I.Y., et al., Potent body weight loss and efficacy in a NASH animal model by a novel long-acting GLP-1/Glucagon/GIP triple-agonist (HM15211), ADA 2017 Poster 1139-P; Ding, K.H., Impact of glucose-dependent insulinotropic peptide on age-induced bone loss, J. BONE MINER. RES., 23(4):536-43 (2008); Tai, J. et. al, Neuroprotective effects of a triple GLP-⅟GIP/glucagon receptor agonist in the APP/PS1 transgenic mouse model of Alzheimer’s disease, BRAIN RES. 1678, 64-74 (2018); T.D. Müller et al., The New Biology and Pharmacology of Glucagon, PHYSIOL. REV. 97: 721-766 (2017); Finan, B. et. al, Unimolecular Dual Incretins Maximize Metabolic Benefits in Rodents, Monkeys, and Humans, SCI. TRANSL. MED., 5:209 (October 2013); Hölscher C, Insulin, incretins and other growth factors as potential novel treatments for Alzheimer’s and Parkinson’s diseases. BIOCHEM. Soc. TRANS. 42(2):593-0 (April 2014).

[0267] Another embodiment provides the use of a compound of the present invention, or a pharmaceutically acceptable salt thereof, in the manufacture of a medicament for the treatment of a condition selected from the group consisting of T2DM, obesity, NAFLD, NASH, dyslipidemia and metabolic syndrome. In an embodiment, the medicament is for the treatment of T2DM. In an embodiment, the medicament is for the treatment of obesity. In an embodiment, the medicament is for the treatment of NAFLD. In an embodiment, the medicament is for the treatment of NASH.

[0268] Another embodiment provides a pharmaceutical composition comprising a compound of Formula I, or a pharmaceutically acceptable salt thereof, and at least one selected from the group consisting of a carrier, diluent, and excipient.

[0269] As used herein, the term “treating” or “to treat” includes restraining, slowing, stopping, or reversing the progression or severity of a symptom, condition, or disorder.

[0270] Certain compounds provided herein are generally effective over a wide dosage range. For example, dosages for once weekly parenteral dosing may fall within the range of 0.05 mg to about 30 mg per person per week. Compounds provided herein are orally available and may be dosed using oral formulation techniques. Oral formulations may be formulated for periodic dosing, such as once daily.

[0271] The compounds of the present invention include novel amino acid sequences having affinity for the respective GLP-1 and GIP receptors, with desired potency at each of these receptors. GLP-1 is a 36 amino acid peptide, the major biologically active fragment of which is produced as a 30-amino acid, C-terminal amidated peptide (GLP-1₇₋₃₆) (SEQ ID NO:2).

[0272] GIP is a 42 amino acid peptide (SEQ ID NO:1), which, like GLP-1, is also known as an incretin, and plays a physiological role in glucose homeostasis by stimulating insulin secretion from pancreatic beta cells in the presence of glucose.

[0273] The compounds provide desired potency at each of the GIP and GLP-1 receptors. In an embodiment, compounds are suitable for oral administration. In an embodiment, compounds have desirable GIP and GLP receptor extended time action.

[0274] As used herein, “linker” means a group conjugating the R₅ fatty acid to a lysine of the peptide. As used herein, “fatty acid” means a hydrocarbon with a carboxyl group. As used herein “Ac” means acetyl modification. In an embodiment, a fatty acid is an albumin binding group. As used herein the term “amino acid” means both naturally occurring amino acids and unnatural amino acids. The amino acids are typically depicted using standard one letter codes (e.g., L = leucine), as well as alpha-methyl substituted residues of natural amino acids (e.g., α-methyl leucine, or αMeL and α-methyl lysine, or αMeK) and certain other unnatural amino acids, such as alpha amino isobutyric acid, or “Aib,” “4Pal,” “Orn,” and the like. The structures of non-natural amino acids and other abbreviations appear below:

[chemical structure]

[chemical structure]

[chemical structure]

[chemical structure]

[chemical structure]

[chemical structure]

[chemical structure]

[chemical structure]

[chemical structure]

[chemical structure]

[chemical structure]

[chemical structure]

[chemical structure]

[chemical structure]

[chemical structure]

[chemical structure]

[chemical structure]

[chemical structure]

[chemical structure]

[chemical structure]

[chemical structure]

[chemical structure]

[chemical structure]

[chemical structure]

[chemical structure]

[chemical structure]

[chemical structure]

[chemical structure]

[chemical structure]

[chemical structure]

[chemical structure]

[chemical structure]

[chemical structure]

[chemical structure]

[chemical structure]

[chemical structure]

[chemical structure]

[chemical structure]

[chemical structure]

[chemical structure]

[chemical structure]

[chemical structure]

[0275] As used herein “Orn” means ornithine. As used herein “4Pal” means 3-(4-Pyridyl)-L-alanine. As used herein “αMeF(2F)” means alpha-methyl 2-F-phenylalanine, alpha-methyl-F(2F), and alpha-methyl-Phe(2F). As used herein “αMeY,” mean alpha methyl tyrosine, alpha methyl-Tyr, and alpha methyl-Y. As used herein, “αMeL” means alpha methyl leucine, alpha methyl-L, and alpha methyl-Leu. As used herein, “e” and “D-Glu” mean D-glutamic acid. As used herein, “αMeF”, means alpha-methyl-F and alpha-methyl-Phe. As used herein, “αMeS”, means alpha-methyl-serine, alpha methyl-S, and alpha-methyl-Ser. As used herein, “AEEA” means (2-[2-(2-Amino-ethoxy)-ethoxy]-acetyl), “AEEA2” means (2-[2-(2-Amino-ethoxy)-ethoxy]-acetyl)₂; and “AEEA3” means (2-[2-(2-Amino-ethoxy)-ethoxy]-acetyl)₃.

[0276] As used herein, “Ahx” is 6-Aminohexanoyl-; “Aoc” is 8-Aminooctanoyl-; “PEG3” is [3-(2-[2-(2-Amino-ethoxy)-ethoxy]-ethoxy)-propanoyl]-; “PEG4” is (3-[2-(2-[2-(2-Amino-ethoxy)-ethoxy]-ethoxy)-ethoxy]-propanoyl)-; “PEG5” is [3-(2-[2-(2-[2-(2-Amino-ethoxy)-ethoxy]-ethoxy)-ethoxy]-ethoxy)-propanoyl]-; and “PEG6” is (3-[2-(2-[2-(2-[2-(2-Amino-ethoxy)-ethoxy]-ethoxy)-ethoxy]-ethoxy)-ethoxy]-propanoyl)-. “Tle” is tert-Leucine.

[0277] As shown in the chemical structures of Examples below, in an embodiment the linker-fatty acid moieties (-R₅R₄), described above, link to the epsilon-amino group of a lysine side-chain.

[0278] When used herein in reference to one or more of the GIP or GLP-1 receptors, the terms “activity,” “activate[s]” “activat[ing]” and the like refers to the capacity of a compound, or a pharmaceutically acceptable salt thereof, to bind to and induce a response at the receptor(s), as measured using assays known in the art, such as the in vitro assays described below.

[0279] The affinity of compounds, or a pharmaceutically acceptable salt thereof, of the present invention for each of the GIP and GLP-1 receptors may be measured using techniques known for measuring receptor binding levels in the art, including, for example those described in the examples below, and is commonly expressed as a Ki value. The activity of the compounds of the present invention at each of the receptors may also be measured using techniques known in the art, including for example the in vitro activity assays described below, and is commonly expressed as an EC₅₀ value, which is the concentration of compound causing half-maximal simulation in a dose response curve.

[0280] In an embodiment, a pharmaceutical composition of a compound of Formula I is suitable for administration by a parenteral route (e.g., subcutaneous, intravenous, intraperitoneal, intramuscular, or transdermal). In an embodiment, a pharmaceutical composition of a compound of Formula I is suitable for oral administration (e.g., tablet, capsule). Some pharmaceutical compositions and processes for preparing same are well known in the art. (See, e.g., Remington: The Science and Practice of Pharmacy (D.B. Troy, Editor, 21st Edition, Lippincott, Williams & Wilkins, 2006).

[0281] Compounds of the provided herein may react with a number of inorganic and organic acids/bases to form pharmaceutically acceptable acid/base addition salts. Pharmaceutically acceptable salts and common methodology for preparing them are well known in the art. (See, e.g., P. Stahl, et al. Handbook of Pharmaceutical Salts: Properties, Selection and Use, 2nd Revised Edition (Wiley-VCH, 2011)). Pharmaceutically acceptable salts of the present invention include, but are not limited to, sodium, trifluoroacetate, hydrochloride, ammonium, and acetate salts. In an embodiment, a pharmaceutically acceptable salt of is selected from the group consisting of sodium, hydrochloride, and acetate salts.

[0282] The present invention also encompasses novel intermediates and processes useful for the synthesis of compounds of the present invention, or a pharmaceutically acceptable salt thereof. The intermediates and compounds of the present invention may be prepared by a variety of procedures known in the art. In particular, the Examples below describe a process using chemical synthesis. The specific synthetic steps for each of the routes described may be combined in different ways to prepare compounds of the present invention. The reagents and starting materials are readily available to one of ordinary skill in the art.

[0283] When used herein, the term “effective amount” refers to the amount or dose of a compound provided herein, or a pharmaceutically acceptable salt thereof, which, upon single or multiple dose administration to the patient, provides the desired effect in the patient under diagnosis or treatment. An effective amount can be determined by a person of skill in the art using known techniques and by observing results obtained under analogous circumstances. In determining the effective amount for a subject, a number of factors are considered, including, but not limited to: the species of mammal; its size, age, and general health; the specific disease or disorder involved; the degree of or involvement or the severity of the disease or disorder; the response of the individual patient; the particular compound administered; the mode of administration; the bioavailability characteristics of the preparation administered; the dose regimen selected, the use of concomitant medication; and other relevant circumstances.

[0284] When used herein, the term “subject in need thereof” refers to a mammal, preferably a human, with a disease or condition requiring treatment or therapy, including for example those listed in the preceding paragraphs. As used herein “EDTA” means ethylenediaminetetraacetic acid. As used herein “DMSO” means dimethyl sulfoxide. As used herein “CPM” means counts per minute. As used herein “IBMX” means 3-isobutyl-1-methylxanthine. As used herein “LC/MS” means liquid chromatography/mass spectrometry. As used herein “HTRF” means homogeneous time-resolved fluorescence. As used herein “BSA” mean bovine serum albumin.

[0285] The invention is further illustrated by the following examples, which are not to be construed as limiting.

### PEPTIDE SYNTHESIS

### Example 1

### Y-Aib-EGT-αMeF(2F)-TSD-4Pal-SI-αMeL-LD-Orn-K((2-[2-(2-Amino-ethoxy)-ethoxy]-acetyl)₂-(γ-Glu)-CO-(CH₂)₁₂-CO₂H)AQ-Aib-EFI-(D-Glu)-αMeY-LIEGGK((2-[2-(2-Amino-ethoxy)-ethoxy]-acetyl)₂-(γ-Glu)-CO-(CH₂)₁₂-CO₂H)SSGAPPPS-NH₂ (SEQ ID NO:11).

[0286] The structure of SEQ ID NO: 11 is depicted below using the standard single letter amino acid codes with the exception of residues Aib2, αMeF(2F)6, 4Pal10, αMeL13, Orn16, K17, Aib20, D-Glu24, αMeY25, K31 and Ser39, where the structures of these amino acid residues have been expanded:

[chemical structure]

[0287] The peptide backbone of Example 1 is synthesized using Fluorenylmethyloxycarbonyl (Fmoc)/tert-Butyl (t-Bu) chemistry on a Symphony multiplex peptide synthesizer (Gyros Protein Technologies. Tucson, AZ).

[0288] The resin consists of 1% DVB cross-linked polystyrene (Fmoc-Rink-MBHA Low Loading resin, 100-200 mesh, EMD Millipore) at a substitution of 0.35 mmol/g. Standard side-chain protecting groups were used. Fmoc-Lys(Mtt)-OH is used for the lysine residues at positions 17 and 31, and Boc-Tyr(tBu)-OH was used for the tyrosine residue at position 1. Fmoc groups are removed prior to each coupling step (2 × 7 minutes) using 20% piperidine in DMF. All standard amino acid couplings are performed for 1 hour, using an equal molar ratio of Fmoc amino acid (0.3 mM in DMF), diisopropylcarbodiimide (0.9 mM in DCM) and Oxyma (0.9 mM in DMF), at a 9-fold molar excess over the theoretical peptide loading. Exceptions are couplings to Cα-methylated amino acids, which are coupled for 3 hours. After completion of the synthesis of the peptide backbone, the resin is thoroughly washed with DCM to remove residual DMF. The Mtt protecting groups on the lysine residues at positions 17 and 31 are selectively removed from the peptide resin using 30% hexafluoroisopropanol (Oakwood Chemicals) in DCM (3 × 1 hour treatments), and the resin is thoroughly washed with DCM and DMF.

[0289] Subsequent attachment of the linker moieties is accomplished by stepwise coupling of 2-[2-(2-Fmoc-amino-ethoxy)-ethoxy]-acetic acid (Fmoc-AEEA-OH, ChemPep, Inc.) and Fmoc-glutamic acid α-t-butyl ester (Fmoc-Glu-OtBu, Ark Pharm, Inc.), following the procedures described above for standard coupling and deprotection reactions. After removal of the final Fmoc protecting groups, mono-OtBu-tetradecanedioic acid (WuXi AppTec, Shanghai, China) is coupled overnight using a 4-fold excess of the fatty acid, diisopropylcarbodiimide, and Oxyma (1: 1 : 1 mol/mol/mol) in 1:1 DCM/DMF. After the synthesis is complete, the peptide-resin is washed with DCM and then thoroughly dried under vacuum.

[0290] The dry resin is treated with 10 mL of cleavage cocktail (trifluoroacetic acid: water: triisopropylsilane, 95:2.5:2.5 v/v) for 2 hours at room temperature. The resin is filtered off, washed twice each with 2 mL of neat TFA, and the combined filtrates are treated with 5-fold excess volume of cold diethyl ether (-20° C.) to precipitate the crude peptide. The peptide/ether suspension is then centrifuged at 3500 rpm for 2 min to form a solid pellet, the supernatant is decanted, and the solid pellet is triturated with ether two additional times and dried in vacuo. The crude peptide is solubilized in 20 mL of 20% acetonitrile/20%acetic acid/60%water and purified by RP- HPLC on a SymmetryPrep 7 µm C18 preparative column (19 × 300 mm, Waters) with linear gradients of 100% acetonitrile and 0.1% TFA/water buffer system (35-55% acetonitrile in 60 min). The purity of peptide is assessed using analytical RP-HPLC and pooling criteria is >95%. The main pool purity of Example 1 is found to be 96.0%. Subsequent lyophilization of the final main product pool yielded the lyophilized peptide TFA salt. The molecular weight is determined by LC- MS (obsd: M+3 =1853.9; calc M+3 = 1854.1)

### Example 2

### Y-Aib-EGT-αMeF(2F)-TSD-4Pal-SI-αMeL-LD-Orn-K((2-[2-(2-Amino-ethoxy)-ethoxy]-acetyl)₂-(γ-Glu)-(10-(4-carboxyphenoxy)decanoyl))AQ-Aib-EFI-(D-Glu)-αMeY-LIEGGK((2-[2-(2-Amino-ethoxy)-ethoxy]-acetyl)₂-(γ-Glu)-(10-(4-carboxyphenoxy)decanoyl))SSGAPPPS-NH₂ (SEQ ID NO: 12)

[0291] The structure of SEQ ID NO: 12 is depicted below using the standard single letter amino acid codes with the exception of residues Aib2, αMeF(2F)6, 4Pal10, αMeL13, Orn16, K17, Aib20, D-Glu24, αMeY25, K31 and Ser39, where the structures of these amino acid residues have been expanded:

[chemical structure]

[0292] The compound according to SEQ ID NO: 12 is prepared substantially as described by the procedures of Example 1, except 4-(9-carboxy-nonyloxy)benzoic acid tert-butyl ester (WuXi AppTec, Shanghai, China) was used in the final coupling step. The molecular weight is determined by LC-MS (obsd: M+3 =1887.1; calc M+3 =1887.4).

### Example 3

### Y-Aib-EGT-αMeF(2F)-TSD-4Pal-SI-αMeL-LD-Orn-K((2-[2-(2-Amino-ethoxy)-ethoxy]-acetyl)₂-(γ-Glu)-(4-(4-iodophenyl)butanoyl))AQ-Aib-EFI-(D-Glu)-αMeY-LIEGGK((2-[2-(2-Amino-ethoxy)-ethoxy]-acetyl)₂-(γ-Glu)-(4-(4-iodophenyl)butanoyl))SSGAPPPS-NH₂ (SEQ ID NO: 13)

[0293] The structure of SEQ ID NO: 13 is depicted below using the standard single letter amino acid codes with the exception of residues Aib2, αMeF(2F)6, 4Pal10, αMeL13, Orn16, K17, Aib20, D-Glu24, αMeY25, K31 and Ser39, where the structures of these amino acid residues have been expanded:

[chemical structure]

[0294] The compound according to SEQ ID NO: 13 is prepared substantially as described by the procedures of Example 1, except 4-(4-Iodophenyl)butyric acid (WuXi AppTec, Shanghai, China) was used in the final coupling step. The molecular weight is determined by LC-MS (obsd: M+3 =1875.1; calc M+3 =1875.2).

### Example 4

### Y-Aib-EGT-αMeF(2F)-TSD-4Pal-SI-αMeL-LD-Orn-K((2-[2-(2-Amino-ethoxy)-ethoxy]-acetyl)₂-(γ-Glu)-(4-(4-tert-butylphenyl)butanoyl))AQ-Aib-EFI-(D-Glu)-αMeY-LIEGGK((2-[2-(2-Amino-ethoxy)-ethoxy]-acetyl)₂-(γ-Glu)-(4-(4-tert-butylphenyl)butanoyl))SSGAPPPS-NHz (SEQ ID NO: 14)

[0295] The structure of SEQ ID NO: 14 is depicted below using the standard single letter amino acid codes with the exception of residues Aib2, αMeF(2F)6, 4Pal10, αMeL13, Orn16, K17, Aib20, D-Glu24, αMeY25, K31 and Ser39, where the structures of these amino acid residues have been expanded:

[chemical structure]

[0296] The compound according to SEQ ID NO: 14 is prepared substantially as described by the procedures of Example 1, except 4-(4-tert-Butylphenyl)butyric acid (WuXi AppTec, Shanghai, China) was used in the final coupling step. The molecular weight is determined by LC-MS (obsd: M+3 =1828.3; calc M+3 =1828.7).

### Example 5

### Y-Aib-EGT-αMeF(2F)-TSD-4Pal-SI-αMeL-LD-Orn-K((2-[2-(2-Amino-ethoxy)-ethoxy]-acetyl)₂-(γ-Glu)-CO-(CH₂)₁₀-CH₃)AQ-Aib-EFI-(D-Glu)-αMeY-LIEGGK((2-[2-(2-Amino-ethoxy)-ethoxy]-acetyl)₂-(γ-Glu)-CO-(CH₂)₁₀-CH₃)SSGAPPPS-NH₂ (SEQ ID NO:15).

[0297] The structure of SEQ ID NO: 15 is depicted below using the standard single letter amino acid codes with the exception of residues Aib2, αMeF(2F)6, 4Pal10, αMeL13, Orn16, K17, Aib20, D-Glu24, αMeY25, K31 and Ser39, where the structures of these amino acid residues have been expanded:

[chemical structure]

[0298] The compound according to SEQ ID NO: 15 is prepared substantially as described by the procedures of Example 1, except Lauric acid (Sigma Aldrich) was used in the final coupling step. The molecular weight is determined by LC-MS (obsd: M+3 =1815.1; calc M+3 =1815.4).

### Examples 6 Through Example 211

[0299] The compounds according to Examples 6 (SEQ ID NO: 16) through Example 494 (SEQ ID NO:504) are prepared substantially as described by the procedures of Example 1.

| Example | Name | SEQ ID NO | MW (g/mol) Calculated |
|---|---|---|---|
| 6 | Y-Aib-EGT-αMeF(2F)-TSD-4Pal-SI-αMeL-LD-Orn-K((2-[2-(2-Amino-ethoxy)-ethoxy]-acetyl)₂-(γ-Glu)-CO-(CH₂)₁₀-CO₂H)AQ-Aib-EFI-(D-Glu)-αMeY-LIEGGK((2-[2-(2-Amino-ethoxy)-ethoxy]-acetyl)₂-(γ-Glu)-CO-(CH₂)₁₀-CO₂H)SSGAPPPS-NH₂ | 16 | 5503.09 |
| 7 | Y-Aib-EGT-αMeF(2F)-TSD-4Pal-SI-αMeL-LD-Orn-K((2-[2-(2-Amino-ethoxy)-ethoxy]-acetyl)₂-(γ-Glu)-CO-(CH₂)₁₄-CH₃)AQ-Aib-EFI-(D-Glu)-αMeY-LIEGGK((2-[2-(2-Amino-ethoxy)-ethoxy]-acetyl)₂-(γ-Glu)-CO-(CH₂)₁₄-CH₃)SSGAPPPS-NH₂ | 17 | 5555.33 |
| 8 | Y-Aib-EGT-αMeF(2F)-TSD-4Pal-SI-αMeL-LD-Orn-K((2-[2-(2-Amino-ethoxy)-ethoxy]-acetyl)₂-(γ-Glu)-CO-(CH₂)₁₂-CH₃)AQ-Aib-EFI-(D-Glu)-αMeY-LIEGGK((2-[2-(2-Amino-ethoxy)-ethoxy]-acetyl)₂-(γ-Glu)-CO-(CH₂)₁₂-CH₃)SSGAPPPS-NH₂ | 18 | 5499.23 |
| 9 | Y-Aib-EGT-αMeF(2F)-TSD-4Pal-SI-αMeL-LD-Orn-K((2-[2-(2-Amino-ethoxy)-ethoxy]-acetyl)₂-CO-(CH₂)₁₂-CO₂H)AQ-Aib-EFI-(D-Glu)-αMeY-LIEGGK((2-[2-(2-Amino-ethoxy)-ethoxy]-acetyl)₂-CO-(CH₂)₁₂-CO₂H)SSGAPPPS-NH₂ | 19 | 5300.97 |
| 10 | Y-Aib-EGT-αMeF(2F)-TSD-4Pal-SI-αMeL-LD-Orn-K((2-[2-(2-Amino-ethoxy)-ethoxy]-acetyl)₂-(10-(4-carboxyphenoxy)decanoyl))AQ-Aib-EFI-(D-Glu)-αMeY-LIEGGK((2-[2-(2-Amino-ethoxy)-ethoxy]-acetyl)₂-(10-(4-carboxyphenoxy)decanoyl))SSGAPPPS-NH₂ | 20 | 5401 |
| 11 | Y-Aib-EGT-αMeF(2F)-TSD-4Pal-SI-αMeL-LD-Orn-K((2-[2-(2-Amino-ethoxy)-ethoxy]-acetyl)-(γ-Glu)-CO-(CH₂)₁₂-CO₂H)AQ-Aib-EFI-(D-Glu)-αMeY-LIEGGK((2-[2-(2-Amino-ethoxy)-ethoxy]-acetyl)-(y-Glu)-CO-(CH₂)₁₂-CO₂H)SSGAPPPS-NH₂ | 21 | 5268.88 |
| 12 | Y-Aib-EGT-αMeF(2F)-TSD-4Pal-SI-αMeL-LD-Orn-K((2-[2-(2-Amino-ethoxy)-ethoxy]-acetyl)-(γ-Glu)-(10-(4-carboxyphenoxy)decanoyl))AQ-Aib-EFI-(D-Glu)-αMeY-LIEGGK((2-[2-(2-Amino-ethoxy)-ethoxy]-acetyl)-(γ-Glu)-(10-(4-carboxyphenoxy)decanoyl))SSGAPPPS-NH₂ | 22 | 5368.91 |
| 13 | Y-Aib-EGT-αMeF(2F)-TSD-4Pal-SI-αMeL-LD-Orn-K((2-[2-(2-Amino-ethoxy)-ethoxy]-acetyl)-(γ-Glu)-CO-(CH₂)₁₄-CH₃)AQ-Aib-EFI-(D-Glu)-αMeY-LIEGGK((2-[2-(2-Amino-ethoxy)-ethoxy]-acetyl)-(γ-Glu)-CO-(CH₂)₁₄-CH₃)SSGAPPPS-NH₂ | 23 | 5265.02 |
| 14 | Y-Aib-EGT-αMeF(2F)-TSD-4Pal-SI-αMeL-LD-Orn-K((2-[2-(2-Amino-ethoxy)-ethoxy]-acetyl)-(γ-Glu)-CO-(CH₂)₁₀-CH₃)AQ-Aib-EFI-(D-Glu)-αMeY-LIEGGK((2-[2-(2-Amino-ethoxy)-ethoxy]-acetyl)-(γ-Glu)-CO-(CH₂)₁₀-CH₃)SSGAPPPS-NH₂ | 24 | 5152.81 |
| 15 | Y-Aib-EGT-αMeF(2F)-TSD-4Pal-SI-αMeL-LD-Orn-K((2-[2-(2-Amino-ethoxy)-ethoxy]-acetyl)₂-(γ-Glu)-CO-(CH₂)₁₂-CO₂H)AQ-Aib-K((2-[2-(2-Amino-ethoxy)-ethoxy]-acetyl)₂-(γ-Glu)-CO-(CH₂)₁₂-CO₂H)FI-(D-Glu)-αMeY-LIEGGPSSGAPPPS-NH₂ | 25 | 5527.2 |
| 16 | Y-Aib-EGT-αMeF(2F)-TSD-4Pal-SI-αMeL-LD-Orn-K((2-[2-(2-Amino-ethoxy)-ethoxy]-acetyl)₂-(γ-Glu)-CO-(CH₂)₁₂-CO₂H)AQ-Aib-EFIK((2-[2-(2-Amino-ethoxy)-ethoxy]-acetyl)₂-(γ-Glu)-CO-(CH₂)₁₂-CO₂H)-αMeY-LIEGGPSSGAPPPS-NH₂ | 26 | 5527.2 |
| 17 | Y-Aib-EGT-αMeF(2F)-TSD-4Pal-SI-αMeL-LD-Orn-K((2-[2-(2-Amino-ethoxy)-ethoxy]-acetyl)₂-(γ-Glu)-CO-(CH₂)₁₂-CO₂H)AQ-Aib-EFI-(D-Glu)-αMeY-LIK((2-[2-(2-Amino-ethoxy)-ethoxy]-acetyl)₂-(γ-Glu)-CO-(CH₂)₁₂-CO₂H)GGPSSGAPPPS-NH₂ | 27 | 5527.2 |
| 18 | Y-Aib-EGT-αMeF(2F)-TSD-4Pal-SI-αMeL-LD-Orn-K((2-[2-(2-Amino-ethoxy)-ethoxy]-acetyl)₂-(γ-Glu)-CO-(CH₂)₁₂-CO₂H)AQ-Aib-EFI-(D-Glu)-αMeY-LIEGK((2-[2-(2-Amino-ethoxy)-ethoxy]-acetyl)₂-(γ-Glu)-CO-(CH₂)₁₂-CO₂H)PSSGAPPPS-NH₂ | 28 | 5599.26 |
| 19 | Y-Aib-EGT-αMeF(2F)-TSD-4Pal-SI-αMeL-LD-Orn-K((2-[2-(2-Amino-ethoxy)-ethoxy]-acetyl)₂-(γ-Glu)-CO-(CH₂)₁₂-CO₂H)AQ-Aib-EFI-(D-Glu)-αMeY-LIEGGP S SGAPPP SK((2-[2-(2-Amino-ethoxy)-ethoxy]-acetyl)₂-(γ-Glu)-CO-(CH₂)₁₂-CO₂H)-NH₂ | 29 | 5656.31 |
| 20 | Y-Aib-EGT-αMeF(2F)-TSD-4Pal-SI-αMeL-LD-Orn-IAQ-Aib-EFI-(D-Glu)-αMeY-LIK((2-[2-(2-Amino-ethoxy)-ethoxy]-acetyl)₂-(γ-Glu)-CO-(CH₂)₁₂-CO₂H)GGK((2-[2-(2-Amino-ethoxy)-ethoxy]-acetyl)₂-(γ-Glu)-CO-(CH₂)₁₂-CO₂H)SSGAPPPS-NH₂ | 30 | 5543.24 |
| 21 | Y-Aib-EGT-αMeF(2F)-TSD-4Pal-SI-αMeL-LD-Orn-K((2-[2-(2-Amino-ethoxy)-ethoxy]-acetyl)₂-(γ-Glu)-CO-(CH₂)₁₄-CH₃)AQ-Aib-K((2-[2-(2-Amino-ethoxy)-ethoxy]-acetyl)₂-(γ-Glu)-CO-(CHz)₁₄-CH₃)FI-(D-Glu)-αMeY-LIEGGPSSGAPPPS-NH₂ | 31 | 5583.3 |
| 22 | Y-Aib-EGT-αMeF(2F)-TSD-4Pal-SI-αMeL-LD-Orn-K((2-[2-(2-Amino-ethoxy)-ethoxy]-acetyl)₂-(γ-Glu)-CO-(CH₂)₁₄-CH₃)AQ-Aib-EFIK((2-[2-(2-Amino-ethoxy)-ethoxy]-acetyl)₂-(γ-Glu)-CO-(CH₂)₁₄-CH₃)-αMeY-LIEGGPSSGAPPPS-NH₂ | 32 | 5583.3 |
| 23 | Y-Aib-EGT-αMeF(2F)-TSD-4Pal-SI-αMeL-LD-Orn-K((2-[2-(2-Amino-ethoxy)-ethoxy]-acetyl)₂-(γ-Glu)-CO-(CH₂)₁₄-CH₃)AQ-Aib-EFI-(D-Glu)-αMeY-LIK((2-[2-(2-Amino-ethoxy)-ethoxy]-acetyl)₂-(γ-Glu)-CO-(CH₂)₁₄-CH₃ )GGPSSGAPPPS-NH₂ | 33 | 5523.34 |
| 24 | Y-Aib-EGT-αMeF(2F)-TSD-4Pal-SI-αMeL-LD-Orn-K((2-[2-(2-Amino-ethoxy)-ethoxy]-acetyl)₂-(γ-Glu)-CO-(CH₂)₁₄-CH₃)AQ-Aib-EFI-(D-Glu)-αMeY-LIEGK((2-[2-(2-Amino-ethoxy)-ethoxy]-acetyl)₂-(γ-Glu)-CO-(CH₂)₁₄-CH₃)PSSGAPPPS-NH₂ | 34 | 5595.4 |
| 25 | Y-Aib-EGT-αMeF(2F)-TSD-4Pal-SI-αMeL-LD-Orn-K((2-[2-(2-Amino-ethoxy)-ethoxy]-acetyl)₂-(γ-Glu)-CO-(CH₂)₁₄-CH₃)AQ-Aib-EFI-(D-Glu)-αMeY-LIEGGPSSGAPPPSK((2-[2-(2-Amino-ethoxy)-ethoxy]-acetyl)₂-(γ-Glu)-CO-(CH₂)₁₄-CH₃)-NH₂ | 35 | 5652.45 |
| 26 | Y-Aib-EGT-αMeF(2F)-TSD-4Pal-SI-αMeL-LD-Orn-IAQ-Aib-EFI-(D-Glu)-αMeY-LIK((2-[2-(2-Amino-ethoxy)-ethoxy]-acetyl)₂-(γ-Glu)-CO-(CH₂)₁₄-CH₃)GGK((2-[2-(2-Amino-ethoxy)-ethoxy]-acetyl)₂-(γ-Glu)-CO-(CH₂)₁₄-CH₃)SSGAPPPS-NH₂ | 36 | 5539.38 |
| 27 | Y-Aib-EGT-αMeF(2F)-TSDK((2-[2-(2-Amino-ethoxy)-ethoxy]-acetyl)₂-(γ-Glu)-CO-(CH₂)₁₂-CO₂H)SI-αMeL-LD-Orn-K((2-[2-(2-Amino-ethoxy)-ethoxy]-acetyl)₂-(γ-Glu)-CO-(CH₂)₁₂-CO₂H)AQ-Aib-EFI-(D-Glu)-αMeY-LIEGGPSSGAPPPS-NH₂ | 37 | 5508.15 |
| 28 | Y-Aib-EGT-αMeF(2F)-TSD-4Pal-SK((2-[2-(2-Amino-ethoxy)-ethoxy]-acetyl)₂-(γ-Glu)-CO-(CH₂)₁₂-CO₂H)-αMeL-LD-Orn-K((2-[2-(2-Amino-ethoxy)-ethoxy]-acetyl)₂-(γ-Glu)-CO-(CH₂)₁₂-CO₂H)AQ-Aib-EFI-(D-Glu)-αMeY-LIEGGPSSGAPPPS-NH₂ | 38 | 5543.15 |
| 29 | Y-Aib-EGT-αMeF(2F)-TSDK((2-[2-(2-Amino-ethoxy)-ethoxy]-acetyl)₂-(γ-Glu)-CO-(CH₂)₁₄-CH₃)SI-αMeL-LD-Orn-K((2-[2-(2-Amino-ethoxy)-ethoxy]-acetyl)₂-(γ-Glu)-CO-(CH₂)₁₄-CH₃)AQ-Aib-EFI-(D-Glu)-αMeY-LIEGGPSSGAPPPS-NH₂ | 39 | 5504.29 |
| 30 | Y-Aib-EGT-αMeF(2F)-TSD-4Pal-SI-αMeL-LD-Orn-K((2-[2-(2-Amino-ethoxy)-ethoxy]-acetyl)₃-(γ-Glu)-CO-(CH₂)₁₂-CO₂H)AQ-Aib-EFI-(D-Glu)-αMeY-LIEGGK((2-[2-(2-Amino-ethoxy)-ethoxy]-acetyl)₃-(γ-Glu)-CO-(CH₂)₁₂-CO₂H)SSGAPPPS-NH₂ | 40 | 5849.51 |
| 31 | Y-Aib-EGT-αMeF(2F)-TSD-4Pal-SI-αMeL-LD-Orn-K((2-[2-(2-Amino-ethoxy)-ethoxy]-acetyl)₃-(γ-Glu)-CO-(CH₂)₁₄-CH₃)AQ-Aib-EFI-(D-Glu)-αMeY-LIEGGK((2-[2-(2-Amino-ethoxy)-ethoxy]-acetyl)₃-(γ-Glu)-CO-(CH₂)₁₄-CH₃)SSGAPPPS-NH₂ | 41 | 5845.65 |
| 32 | Y-Aib-EGT-αMeF(2F)-TSD-4Pal-SI-αMeL-LD-Orn-K((2-[2-(2-Amino-ethoxy)-ethoxy]-acetyl)₂-(γ-Glu)-CO-(CH₂)₁₄-CH₃)AQ-Aib-EFI-(D-Glu)K((2-[2-(2-Amino-ethoxy)-ethoxy]-acetyl)₂-(γ-Glu)-CO-(CH₂)₁₄-CH₃)LIEGGPSSGAPPPS-NH₂ | 42 | 5475.25 |
| 33 | Y-Aib-EGT-αMeF(2F)-TSD-4Pal-SI-αMeL-LD-Orn-K((2-[2-(2-Amino-ethoxy)-ethoxy]-acetyl)₂-(εK)-CO-(CH₂)₁₂-CO₂H)AQ-Aib-EFI-(D-Glu)-αMeY-LIEGGK((2-[2-(2-Amino-ethoxy)-ethoxy]-acetyl)₂-(εK)-CO-(CH₂)₁₂-CO₂H)SSGAPPPS-NH₂ | 43 | 5557.31 |
| 34 | Y-Aib-EGT-αMeF(2F)-TSD-4Pal-SI-αMeL-LD-Orn-K((2-[2-(2-Amino-ethoxy)-ethoxy]-acetyl)₂-(εK)-(γ-Glu)-CO-(CH₂)₁₂-CO₂H)AQ-Aib-EFI-(D-Glu)-αMeY-LIEGGK((2-[2-(2-Amino-ethoxy)-ethoxy]-acetyl)₂-(εK)-(γ-Glu)-CO-(CH₂)₁₂-CO₂H)SSGAPPPS-NH₂ | 44 | 5815.54 |
| 35 | Y-Aib-EGT-αMeF(2F)-TSD-4Pal-SI-αMeL-LD-Orn-K((2-[2-(2-Amino-ethoxy)-ethoxy]-acetyl)-(εK)-(γ-Glu)-CO-(CH₂)₁₂-CO₂H)AQ-Aib-EFI-(D-Glu)-αMeY-LIEGGK((2-[2-(2-Amino-ethoxy)-ethoxy]-acetyl)-(εK)-(γ-Glu)-CO-(CH₂)₁₂-CO₂H)SSGAPPP S-NH₂ | 45 | 5525.23 |
| 36 | Y-Aib-EGT-αMeF(2F)-TSD-4Pal-SI-αMeL-LD-Orn-K((εK)-(2-[2-(2-Amino-ethoxy)-ethoxy]-acetyl)-(γ-Glu)-CO-(CH₂)₁₂-CO₂H)AQ-Aib-EFI-(D-Glu)-αMeY-LIEGGK((εK)-(2-[2-(2-Amino-ethoxy)-ethoxy]-acetyl)-(γ-Glu)-CO-(CH₂)₁₂-CO₂H)SSGAPPPS-NH₂ | 46 | 5525.23 |
| 37 | Y-Aib-EGT-αMeF(2F)-TSD-4Pal-SI-αMeL-LD-Orn-K((εK)-(2-[2-(2-Amino-ethoxy)-ethoxy]-acetyl)₂-(γ-Glu)-CO-(CH₂)₁₂-CO₂H)AQ-Aib-EFI-(D-Glu)-αMeY-LIEGGK((εK)-(2-[2-(2-Amino-ethoxy)-ethoxy]-acetyl)₂-(γ-Glu)-CO-(CH₂)₁₂-CO₂H)SSGAPPPS-NH₂ | 47 | 5815.54 |
| 38 | Y-Aib-EGT-αMeF(2F)-TSD-4Pal-SI-αMeL-LD-Orn-K((εK)-(γ-Glu)-CO-(CH₂)₁₂-CO₂H)AQ-Aib-EFI-(D-Glu)-αMeY-LIEGGK((εK)-(γ-Glu)-CO-(CH₂)₁₂-CO₂H)SSGAPPPS-NH₂ | 48 | 5234.91 |
| 39 | Y-Aib-EGT-αMeF(2F)-TSD-4Pal-SI-αMeL-LD-Orn-K((εK)-(γ-Glu)-(γ-Glu)-CO-(CH₂)₁₂-CO₂H)AQ-Aib-EFI-(D-Glu)-αMeY-LIEGGK((εK)-(γ-Glu)-(γ-Glu)-CO-(CH₂)₁₂-CO₂H)SSGAPPPS-NH₂ | 49 | 5493.14 |
| 40 | Y-Aib-EGT-αMeF(2F)-TSD-4Pal-SI-αMeL-LD-Orn-K((εK)-(εK)-(γ-Glu)-CO-(CH₂)₁₂-CO₂H)AQ-Aib-EFI-(D-Glu)-αMeY-LIEGGK((εK)-(εK)-(γ-Glu)-CO-(CH₂)₁₂-CO₂H)SSGAPPPS-NH₂ | 50 | 5491.26 |
| 41 | Y-Aib-EGT-αMeF(2F)-TSD-4Pal-SI-αMeL-LD-Orn-K((γ-Glu)-(2-[2-(2-Amino-ethoxy)-ethoxy]-acetyl)₂-CO-(CH₂)₁₂-CO₂H)AQ-Aib-EFI-(D-Glu)-αMeY-LIEGGK((γ-Glu)-(2-[2-(2-Amino-ethoxy)-ethoxy]-acetyl)₂-CO-(CH₂)₁₂-CO₂H)SSGAPPPS-NH₂ | 51 | 5559.19 |
| 42 | Y-Aib-EGT-αMeF(2F)-TSD-4Pal-SI-αMeL-LD-Orn-K((γ-Glu)-(2-[2-(2-Amino-ethoxy)-ethoxy]-acetyl)-CO-(CH₂)₁₂-CO₂H)AQ-Aib-EFI-(D-Glu)-αMeY-LIEGGK((γ-Glu)-(2-[2-(2-Amino-ethoxy)-ethoxy]-acetyl)-CO-(CH₂)₁₂-CO₂H)SSGAPPPS-NH₂ | 52 | 5268.88 |
| 43 | Y-Aib-EGT-αMeF(2F)-TSD-4Pal-SI-αMeL-LD-Orn-K((2-[2-(2-Amino-ethoxy)-ethoxy]-acetyl)-(γ-Glu)-(2-[2-(2-Amino-ethoxy)-ethoxy]-acetyl)-CO-(CH₂)₁₂-CO₂H)AQ-Aib-EFI-(D-Glu)-αMeY-LIEGGK((2-[2-(2-Amino-ethoxy)-ethoxy]-acetyl)-(γ-Glu)-(2-[2-(2-Amino-ethoxy)-ethoxy]-acetyl)-CO-(CH₂)₁₂-CO₂H)SSGAPPPS-NH₂ | 53 | 5559.19 |
| 44 | Y-Aib-EGT-αMeF-TSD-4Pal-SI-αMeL-LD-Orn-K((2-[2-(2-Amino-ethoxy)-ethoxy]-acetyl)₂-(γ-Glu)-CO-(CH₂)₁₂-CO₂H)AQ-Aib-EFI-(D-Glu)-αMeY-LIEGGK((2-[2-(2-Amino-ethoxy)-ethoxy]-acetyl)₂-(γ-Glu)-CO-(CH₂)₁₂-CO₂H)SSGAPPPS-NH₂ | 54 | 5541.2 |
| 45 | Y-Aib-EGT-αMeF-TSD-αMeF-SI-αMeL-LD-Orn-K((2-[2-(2-Amino-ethoxy)-ethoxy]-acetyl)₂-(γ-Glu)-CO-(CH₂)₁₂-CO₂H)AQ-Aib-EFI-(D-Glu)-αMeY-LIEGGK((2-[2-(2-Amino-ethoxy)-ethoxy]-acetyl)₂-(γ-Glu)-CO-(CH₂)₁₂-CO₂H)SSGAPPPS-NH₂ | 55 | 5554.24 |
| 46 | Y-Aib-EGT-αMeF-TSD-4Pal-SI-αMeF-LD-Orn-K((2-[2-(2-Amino-ethoxy)-ethoxy]-acetyl)₂-(γ-Glu)-CO-(CH₂)₁₂-CO₂H)AQ-Aib-EFI-(D-Glu)-αMeY-LIEGGK((2-[2-(2-Amino-ethoxy)-ethoxy]-acetyl)₂-(γ-Glu)-CO-(CH₂)₁₂-CO₂H)SSGAPPPS-NH₂ | 56 | 5575.22 |
| 47 | Y-Aib-EGT-αMeF-TSD-4Pal-SI-αMeL-LD-Orn-K((2-[2-(2-Amino-ethoxy)-ethoxy]-acetyl)₂-(γ-Glu)-CO-(CH₂)₁₂-CO₂H)AQ-Aib-E-αMeF-I-(D-Glu)-αMeY-LIEGGK((2-[2-(2-Amino-ethoxy)-ethoxy]-acetyl)₂-(γ-Glu)-CO-(CH₂)₁₂-CO₂H)SSGAPPPS-NH₂ | 57 | 5555.23 |
| 48 | Y-Aib-EGT-αMeF-TSD-4Pal-SI-αMeL-LD-Orn-K((2-[2-(2-Amino-ethoxy)-ethoxy]-acetyl)₂-(γ-Glu)-CO-(CH₂)₁₂-CO₂H)AQ-Aib-EFI-(D-Glu)-αMeF-LIEGGK((2-[2-(2-Amino-ethoxy)-ethoxy]-acetyl)₂-(γ-Glu)-CO-(CH₂)₁₂-CO₂H)SSGAPPPS-NH₂ | 58 | 5525.2 |
| 49 | Y-Aib-EGT-αMeF(2F)-TSDY-aMeS-I-αMeL-LD-Orn-K((2-[2-(2-Amino-ethoxy)-ethoxy]-acetyl)₂-(γ-Glu)-CO-(CH₂)₁₂-CO₂H)AQ-Aib-EFI-(D-Glu)-αMeY-LIEGGK((2-[2-(2-Amino-ethoxy)-ethoxy]-acetyl)₂-(γ-Glu)-CO-(CH₂)₁₂-CO₂H)SSGAPPPS-NH₂ | 59 | 5588.23 |
| 50 | Y-Aib-EGT-αMeF(2F)-TSDY-Aib-I-αMeL-LD-Orn-K((2-[2-(2-Amino-ethoxy)-ethoxy]-acetyl)₂-(γ-Glu)-CO-(CH₂)₁₂-CO₂H)AQ-Aib-EFI-(D-Glu)-αMeY-LIEGGK((2-[2-(2-Amino-ethoxy)-ethoxy]-acetyl)₂-(γ-Glu)-CO-(CH₂)₁₂-CO₂H)SSGAPPPS-NH₂ | 60 | 5572.23 |
| 51 | Y-Aib-EGT-αMeF(2F)-TSD-αMeL-SI-aMeL-LD-Orn-K((2-[2-(2-Amino-ethoxy)-ethoxy]-acetyl)₂-(γ-Glu)-CO-(CH₂)₁₂-CO₂H)AQ-Aib-EFI-(D-Glu)-αMeY-LIEGGK((2-[2-(2-Amino-ethoxy)-ethoxy]-acetyl)₂-(γ-Glu)-CO-(CH₂)₁₂-CO₂H)SSGAPPPS-NH₂ | 61 | 5538.22 |
| 52 | Y-Aib-EGT-αMeF(2F)-TSD-aMeV-SI-αMeL-LD-Orn-K((2-[2-(2-Amino-ethoxy)-ethoxy]-acetyl)₂-(γ-Glu)-CO-(CH₂)₁₂-CO₂H)AQ-Aib-EFI-(D-Glu)-αMeY-LIEGGK((2-[2-(2-Amino-ethoxy)-ethoxy]-acetyl)₂-(γ-Glu)-CO-(CH₂)₁₂-CO₂H)SSGAPPPS-NH₂ | 62 | 5524.19 |
| 53 | Y-Aib-EGT-αMeF(2F)-TSD-Ac5c-SI-αMeL-LD-Orn-K((2-[2-(2-Amino-ethoxy)-ethoxy]-acetyl)₂-(γ-Glu)-CO-(CH₂)₁₂-CO₂H)AQ-Aib-EFI-(D-Glu)-αMeY-LIEGGK((2-[2-(2-Amino-ethoxy)-ethoxy]-acetyl)₂-(γ-Glu)-CO-(CH₂)₁₂-CO₂H)SSGAPPPS-NH₂ | 63 | 5522.17 |
| 54 | Y-Aib-EGT-αMeF(2F)-TSD-Ac6c-SI-αMeL-LD-Orn-K((2-[2-(2-Amino-ethoxy)-ethoxy]-acetyl)₂-(γ-Glu)-CO-(CH₂)₁₂-CO₂H)AQ-Aib-EFI-(D-Glu)-αMeY-LIEGGK((2-[2-(2-Amino-ethoxy)-ethoxy]-acetyl)₂-(γ-Glu)-CO-(CH₂)₁₂-CO₂H)SSGAPPPS-NH₂ | 64 | 5536.2 |
| 55 | Y-Aib-EGT-αMeF(2F)-TSD-Bip-SI-αMeL-LD-Orn-K((2-[2-(2-Amino-ethoxy)-ethoxy]-acetyl)₂-(γ-Glu)-CO-(CH₂)₁₂-CO₂H)AQ-Aib-EFI-(D-Glu)-αMeY-LIEGGK((2-[2-(2-Amino-ethoxy)-ethoxy]-acetyl)₂-(γ-Glu)-CO-(CH₂)₁₂-CO₂H)SSGAPPPS-NH₂ | 65 | 5634.3 |
| 56 | Y-Aib-EGT-αMeF(2F)-TSD-1Nal-SI-αMeL-LD-Orn-K((2-[2-(2-Amino-ethoxy)-ethoxy]-acetyl)₂-(γ-Glu)-CO-(CH₂)₁₂-CO₂H)AQ-Aib-EFI-(D-Glu)-αMeY-LIEGGK((2-[2-(2-Amino-ethoxy)-ethoxy]-acetyl)₂-(γ-Glu)-CO-(CH₂)₁₂-CO₂H)SSGAPPPS-NH₂ | 66 | 5608.26 |
| 57 | Y-Aib-EGT-αMeF(2F)-TSD-2Nal-SI-αMeL-LD-Orn-K((2-[2-(2-Amino-ethoxy)-ethoxy]-acetyl)₂-(γ-Glu)-CO-(CH₂)₁₂-CO₂H)AQ-Aib-EFI-(D-Glu)-αMeY-LIEGGK((2-[2-(2-Amino-ethoxy)-ethoxy]-acetyl)₂-(γ-Glu)-CO-(CH₂)₁₂-CO₂H)SSGAPPPS-NH₂ | 67 | 5608.26 |
| 58 | Y-Aib-EGT-αMeF(2F)-TSD-OMeY-SI-αMeL-LD-Orn-K((2-[2-(2-Amino-ethoxy)-ethoxy]-acetyl)₂-(γ-Glu)-CO-(CH₂)₁₂-CO₂H)AQ-Aib-EFI-(D-Glu)-αMeY-LIEGGK((2-[2-(2-Amino-ethoxy)-ethoxy]-acetyl)₂-(γ-Glu)-CO-(CH₂)₁₂-CO₂H)SSGAPPPS-NH₂ | 68 | 5588.23 |
| 59 | Y-Aib-EGT-αMeF(2F)-TSD-hTyr-SI-αMeL-LD-Orn-K((2-[2-(2-Amino-ethoxy)-ethoxy]-acetyl)₂-(γ-Glu)-CO-(CH₂)₁₂-CO₂H)AQ-Aib-EFI-(D-Glu)-αMeY-LIEGGK((2-[2-(2-Amino-ethoxy)-ethoxy]-acetyl)₂-(γ-Glu)-CO-(CH₂)₁₂-CO₂H)SSGAPPPS-NH₂ | 69 | 5588.23 |
| 60 | Y-Aib-EGT-αMeF(2F)-TSD-Nle-SI-αMeL-LD-Orn-K((2-[2-(2-Amino-ethoxy)-ethoxy]-acetyl)₂-(γ-Glu)-CO-(CH₂)₁₂-CO₂H)AQ-Aib-EFI-(D-Glu)-αMeY-LIEGGK((2-[2-(2-Amino-ethoxy)-ethoxy]-acetyl)₂-(γ-Glu)-CO-(CH₂)₁₂-CO₂H)SSGAPPPS-NH₂ | 70 | 5524.19 |
| 61 | Y-Aib-EGT-αMeF(2F)-TSD-4Pal-SI-αMeL-LD-Orn-K((2-[2-(2-Amino-ethoxy)-ethoxy]-acetyl)₂-(γ-Glu)-CO-(CH₂)₁₂-CO₂H)AQ-Aib-E-(2ClPhe)-I-(D-Glu)-αMeY-LIEGGK((2-[2-(2-Amino-ethoxy)-ethoxy]-acetyl)₂-(γ-Glu)-CO-(CH₂)₁₂-CO₂H)SSGAPPPS-NH₂ | 71 | 5593.64 |
| 62 | Y-Aib-EGT-αMeF(2F)-TSD-4Pal-SI-αMeL-LD-Orn-K((2-[2-(2-Amino-ethoxy)-ethoxy]-acetyl)₂-(γ-Glu)-CO-(CH₂)₁₂-CO₂H)AQ-Aib-E-(3ClPhe)-I-(D-Glu)-αMeY-LIEGGK((2-[2-(2-Amino-ethoxy)-ethoxy]-acetyl)₂-(γ-Glu)-CO-(CH₂)₁₂-CO₂H)SSGAPPPS-NH₂ | 72 | 5593.64 |
| 63 | Y-Aib-EGT-αMeF(2F)-TSD-4Pal-SI-αMeL-LD-Orn-K((2-[2-(2-Amino-ethoxy)-ethoxy]-acetyl)₂-(γ-Glu)-CO-(CH₂)₁₂-CO₂H)AQ-Aib-E-(2FPhe)-I-(D-Glu)-αMeY-LIEGGK((2-[2-(2-Amino-ethoxy)-ethoxy]-acetyl)₂-(γ-Glu)-CO-(CH₂)₁₂-CO₂H)SSGAPPPS-NH₂ | 73 | 5577.18 |
| 64 | Y-Aib-EGT-αMeF(2F)-TSD-4Pal-SI-αMeL-LD-Orn-K((2-[2-(2-Amino-ethoxy)-ethoxy]-acetyl)₂-(γ-Glu)-CO-(CH₂)₁₂-CO₂H)AQ-Aib-E-3FPhe-I-(D-Glu)-αMeY-LIEGGK((2-[2-(2-Amino-ethoxy)-ethoxy]-acetyl)₂-(γ-Glu)-CO-(CH₂)₁₂-CO₂H)SSGAPPPS-NH₂ | 74 | 5577.18 |
| 65 | Y-Aib-EGT-αMeF(2F)-TSD-4Pal-SI-αMeL-LD-Orn-K((2-[2-(2-Amino-ethoxy)-ethoxy]-acetyl)₂-(γ-Glu)-CO-(CH₂)₁₂-CO₂H)AQ-Aib-E-3,5FPhe-I-(D-Glu)-αMeY-LIEGGK((2-[2-(2-Amino-ethoxy)-ethoxy]-acetyl)₂-(γ-Glu)-CO-(CH₂)₁₂-CO₂H)SSGAPPPS-NH₂ | 75 | 5595.17 |
| 66 | Y-Aib-EGT-αMeF(2F)-TSD-4Pal-SI-αMeL-LD-Orn-K((2-[2-(2-Amino-ethoxy)-ethoxy]-acetyl)₂-(γ-Glu)-CO-(CH₂)₁₂-CO₂H)AQ-Aib-E-1Nal-I-(D-Glu)-αMeY-LIEGGK((2-[2-(2-Amino-ethoxy)-ethoxy]-acetyl)₂-(γ-Glu)-CO-(CH₂)₁₂-CO₂H)SSGAPPPS-NH₂ | 76 | 5609.25 |
| 67 | Y-Aib-EGT-αMeF(2F)-TSD-4Pal-SI-αMeL-LD-Orn-K((2-[2-(2-Amino-ethoxy)-ethoxy]-acetyl)₂-(γ-Glu)-(4-(4-tert-butylphenyl)butanoyl))AQ-Aib-EFI-(D-Glu)-K((2-[2-(2-Amino-ethoxy)-ethoxy]-acetyl)₂-(γ-Glu)-(4-(4-tert-butylphenyl)butanoyl))LIEGGPSSGAPPPS-NH₂ | 77 | 5403.02 |
| 68 | Y-Aib-EGT-αMeF(2F)-TSD-4Pal-SI-αMeL-LD-Orn-K((2-[2-(2-Amino-ethoxy)-ethoxy]-acetyl)₂-(γ-Glu)-(4-(4-tert-butylphenyl)butanoyl))AQ-Aib-EFIE-K((2-[2-(2-Amino-ethoxy)-ethoxy]-acetyl)₂-(γ-Glu)-(4-(4-tert-butylphenyl)butanoyl))LIEGGPSSGAPPPS-NH₂ | 78 | 5403.02 |
| 69 | Y-Aib-EGT-αMeF(2F)-TSD-4Pal-SI-αMeL-LD-Orn-IAQ-Aib-K((2-[2-(2-Amino-ethoxy)-ethoxy]-acetyl)₂-(γ-Glu)-CO-(CH₂)₁₂-CO₂H)FIK((2-[2-(2-Amino-ethoxy)-ethoxy]-acetyl)₂-(γ-Glu)-CO-(CH₂)₁₂-CO₂H)-αMeY-LIEGGPSSGAPPPS-NH₂ | 79 | 5511.24 |
| 70 | Y-Aib-EGT-αMeF(2F)-TSD-4Pal-SI-αMeL-LD-Orn-IAQ-Aib-EFIK((2-[2-(2-Amino-ethoxy)-ethoxy]-acetyl)₂-(γ-Glu)-CO-(CH₂)₁₂-CO₂H)-αMeY-LIK((2-[2-(2-Amino-ethoxy)-ethoxy]-acetyl)₂-(γ-Glu)-CO-(CH₂)₁₂-CO₂H)GGPSSGAPPPS-NH₂ | 80 | 5511.24 |
| 71 | Y-Aib-EGT-αMeF(2F)-TSD-4Pal-SI-αMeL-LD-Orn-IAQ-Aib-EFIK((2-[2-(2-Amino-ethoxy)-ethoxy]-acetyl)₂-(γ-Glu)-CO-(CH₂)₁₂-CO₂H)-αMeY-LIEGGK((2-[2-(2-Amino-ethoxy)-ethoxy]-acetyl)₂-(γ-Glu)-CO-(CH₂)₁₂-CO₂H)SSGAPPPS-NH₂ | 81 | 5543.24 |
| 72 | Y-Aib-EGT-αMeF(2F)-TSD-4Pal-SI-αMeL-LD-Orn-IAQ-Aib-EFIK((2-[2-(2-Amino-ethoxy)-ethoxy]-acetyl)₂-(γ-Glu)-CO-(CH₂)₁₂-CO₂H)-αMeY-LIEGGPSSGAPPPSK((2-[2-(2-Amino-ethoxy)-ethoxyl-acetyl)₂-(γ-Glu)-CO-(CH₂)₁₂-CO₂H)-NH₂ | 82 | 5640.35 |
| 73 | Y-Aib-EGT-αMeF(2F)-TSD-4Pal-SI-αMeL-LD-Orn-IAQ-Aib-K((2-[2-(2-Amino-ethoxy)-ethoxy]-acetyl)₂-(γ-Glu)-CO-(CH₂)₁₂-CO₂H)FI-(D-Glu)-αMeY-LIK((2-[2-(2-Amino-ethoxy)-ethoxy]-acetyl)₂-(γ-Glu)-CO-(CH₂)₁₂-CO₂H)GGPSSGAPPPS-NH₂ | 83 | 5511.24 |
| 74 | Y-Aib-EGT-αMeF(2F)-TSD-4Pal-SI-αMeL-LD-Orn-IAQ-Aib-K((2-[2-(2-Amino-ethoxy)-ethoxy]-acetyl)₂-(γ-Glu)-CO-(CH₂)₁₂-CO₂H)FI-(D-Glu)-αMeY-LIEGGK((2-[2-(2-Amino-ethoxy)-ethoxy]-acetyl)₂-(γ-Glu)-CO-(CH₂)₁₂-CO₂H)SSGAPPPS-NH₂ | 84 | 5543.24 |
| 75 | Y-Aib-EGT-αMeF(2F)-TSD-4Pal-SI-αMeL-LD-Orn-IAQ-Aib-K((2-[2-(2-Amino-ethoxy)-ethoxy]-acetyl)₂-(γ-Glu)-CO-(CH₂)₁₂-CO₂H)FI-(D-Glu)-αMeY-LIEGGPSSGAPPPSK((2-[2-(2-Amino-ethoxy)-ethoxyl-acetyl)₂-(γ-Glu)-CO-(CH₂)₁₂-CO₂H)-NH₂ | 85 | 5640.35 |
| 76 | Y-Aib-EGT-αMeF(2F)-TSD-4Pal-SI-αMeL-LD-Orn-K((2-[2-(2-Amino-ethoxy)-ethoxy]-acetyl)-(y-Glu)-CO-(CH₂)₁₂-CO₂H)AQ-Aib-K((2-[2-(2-Amino-ethoxy)-ethoxy]-acetyl)-(γ-Glu)-CO-(CH₂)₁₂-CO₂H)FI-(D-Glu)-αMeY-LIEGGPSSGAPPPS-NH₂ | 86 | 5236.88 |
| 77 | Y-Aib-EGT-αMeF(2F)-TSD-4Pal-SI-αMeL-LD-Orn-K((2-[2-(2-Amino-ethoxy)-ethoxy]-acetyl)₃-(γ-Glu)-CO-(CH₂)₁₂-CO₂H)AQ-Aib-K((2-[2-(2-Amino-ethoxy)-ethoxy]-acetyl)₃-(γ-Glu)-CO-(CH₂)₁₂-CO₂H)FI-(D-Glu)-αMeY-LIEGGPSSGAPPPS-NH₂ | 87 | 5817.51 |
| 78 | Y-Aib-EGT-αMeF(2F)-TSD-4Pal-SI-αMeL-LD-Orn-K((2-[2-(2-Amino-ethoxy)-ethoxy]-acetyl)₂-CO-(CH₂)₁₂-CO₂H)AQ-Aib-K((2-[2-(2-Amino-ethoxy)-ethoxy]-acetyl)₂-CO-(CH₂)₁₂-CO₂H)Fl-(D-Glu)-aMeY-LIEGGPSSGAPPPS-NH₂ | 88 | 5268.97 |
| 79 | Y-Aib-EGT-αMeF(2F)-TSD-4Pal-SI-αMeL-LD-Orn-K((2-[2-(2-Amino-ethoxy)-ethoxy]-acetyl)-(γ-Glu)-CO-(CH₂)₁₂-CO₂H)AQ-Aib-EFIK((2-[2-(2-Amino-ethoxy)-ethoxy]-acetyl)-(γ-Glu)-CO-(CH₂)₁₂-CO₂H)-αMeY-LIEGGPSSGAPPPS-NH₂ | 89 | 5236.88 |
| 80 | Y-Aib-EGT-αMeF(2F)-TSD-4Pal-SI-αMeL-LD-Orn-K((2-[2-(2-Amino-ethoxy)-ethoxy]-acetyl)₃-(γ-Glu)-CO-(CH₂)₁₂-CO₂H)AQ-Aib-EFIK((2-[2-(2-Amino-ethoxy)-ethoxy]-acetyl)₃-(γ-Glu)-CO-(CH₂)₁₂-CO₂H)-αMeY-LIEGGPSSGAPPPS-NH₂ | 90 | 5817.51 |
| 81 | Y-Aib-EGT-aMeF(2F)-TSD-4Pal-SI-aMeL-LD-Orn-K((2-[2-(2-Amino-ethoxy)-ethoxy]-acetyl)₂-CO-(CH₂)₁₂-CO₂H)AQ-Aib-EFIK((2-[2-(2-Amino-ethoxy)-ethoxy]-acetyl)₂-CO-(CH₂)₁₂-CO₂H)-αMeY-LIEGGPSSGAPPPS-NH₂ | 91 | 5268.97 |
| 82 | Y-Aib-EGT-αMeF(2F)-TSD-4Pal-SI-αMeL-LD-Orn-K((2-[2-(2-Amino-ethoxy)-ethoxy]-acetyl)₂-(γ-Glu)-CO-(CH₂)₁₂-CO₂H)AQ-Aib-E-αMeF-IK((2-[2-(2-Amino-ethoxy)-ethoxy]-acetyl)₂-(γ-Glu)-CO-(CH₂)₁₂-CO₂H)-αMeY-LIEGGPSSGAPPPS-NH₂ | 92 | 5541.22 |
| 83 | Y-Aib-EGT-αMeF(2F)-TSD-4Pal-SI-αMeL-LD-Orn-K((2-[2-(2-Amino-ethoxy)-ethoxy]-acetyl)₂-(γ-Glu)-CO-(CH₂)₁₂-CO₂H)AQ-Aib-EFIK((2-[2-(2-Amino-ethoxy)-ethoxy]-acetyl)z-(γ-Glu)-CO-(CH₂)₁₂-CO₂H)-αMeF-LIEGGPSSGAPPPS-NH₂ | 93 | 5511.2 |
| 84 | Y-Aib-EGT-αMeF(2F)-TSD-4Pal-SI-αMeL-LD-Orn-K((2-[2-(2-Amino-ethoxy)-ethoxy]-acetyl)₂-(γ-Glu)-CO-(CH₂)₁₂-CO₂H)AQ-Aib-E-αMeF-IK((2-[2-(2-Amino-ethoxy)-ethoxy]-acetyl)₂-(γ-Glu)-CO-(CH₂)₁₂-CO₂H)-αMeF-LIEGGPSSGAPPPS-NH₂ | 94 | 5525.22 |
| 85 | Y-Aib-EGT-αMeF(2F)-TSD-4Pal-SI-αMeL-LD-Orn-K((2-[2-(2-Amino-ethoxy)-ethoxy]-acetyl)₂-(γ-Glu)-CO-(CH₂)₁₂-CO₂H)AQ-Aib-E-αMeF-IK((2-[2-(2-Amino-ethoxy)-ethoxy]-acetyl)₂-(γ-Glu)-CO-(CH₂)₁₂-CO₂H)YLIEGGPSSGAPPPS-NH₂ | 95 | 5527.2 |
| 86 | Y-Aib-EGT-αMeF(2F)-TSD-4Pal-SI-αMeL-LD-Orn-QAQ-Aib-EFI-(D-Glu)-αMeY-LIK((2-[2-(2-Amino-ethoxy)-ethoxy]-acetyl)₂-(γ-Glu)-CO-(CH₂)₁₂-CO₂H)GGK((2-[2-(2-Amino-ethoxy)-ethoxy]-acetyl)₂-(γ-Glu)-Co-(CH₂)₁₂-CO₂H)SSGAPPPS-NH₂ | 96 | 5558.21 |
| 87 | Y-Aib-EGT-αMeF(2F)-TSD-αMeF(2F)-SI-αMeL-LD-Orn-K((2-[2-(2-Amino-ethoxy)-ethoxy]-acetyl)₂-(γ-Glu)-CO-(CH₂)₁₂-CO₂H)AQ-Aib-EFI-(D-Glu)-αMeY-LIEGGK((2-[2-(2-Amino-ethoxy)-ethoxy]-acetyl)₂-(γ-Glu)-CO-(CH₂)₁₂-CO₂H)SSGAPPPS-NH₂ | 97 | 5590.22 |
| 88 | Y-Aib-EGT-αMeF(2F)-TSD-4Pal-SI-αMeL-LD-Orn-K((2-[2-(2-Amino-ethoxy)-ethoxy]-acetyl)₂-(γ-Glu)-CO-(CH₂)₁₂-CO₂H)AQ-Aib-E-αMeF(2F)-I-(D-Glu)-αMeY-LIEGGK((2-[2-(2-Amino-ethoxy)-ethoxy]-acetyl)₂-(γ-Glu)-CO-(CH₂)₁₂-CO₂H)SSGAPPPS-NH₂ | 98 | 5587.25 |
| 89 | Y-Aib-EGT-αMeF(2F)-TSD-4Pal-Aib-I-αMeL-LD-Orn-K((2-[2-(2-Amino-ethoxy)-ethoxy]-acetyl)₂-(γ-Glu)-CO-(CH₂)₁₂-CO₂H)AQ-Aib-EFI-(D-Glu)-αMeY-LIEGGK((2-[2-(2-Amino-ethoxy)-ethoxy]-acetyl)₂-(γ-Glu)-CO-(CH₂)₁₂-CO₂H)SSGAPPPS-NH₂ | 99 | 5557.22 |
| 90 | Y-Aib-EGT-αMeF(2F)-TSDVSI-αMeL-LD-Orn-K((2-[2-(2-Amino-ethoxy)-ethoxy]-acetyl)₂-(γ-Glu)-CO-(CH₂)₁₂-CO₂H)AQ-Aib-EFI-(D-Glu)-αMeY-LIEGGK((2-[2-(2-Amino-ethoxy)-ethoxy]-acetyl)₂-(γ-Glu)-CO-(CH₂)₁₂-CO₂H)SSGAPPPS-NH₂ | 100 | 5510.16 |
| 91 | Y-Aib-EGT-αMeF(2F)-TSDV-Aib-I-αMeL-LD-Orn-K((2-[2-(2-Amino-ethoxy)-ethoxy]-acetyl)₂-(γ-Glu)-CO-(CH₂)₁₂-CO₂H)AQ-Aib-EFI-(D-Glu)-αMeY-LIEGGK((2-[2-(2-Amino-ethoxy)-ethoxy]-acetyl)₂-(γ-Glu)-CO-(CH₂)₁₂-CO₂H)SSGAPPPS-NH₂ | 101 | 5508.19 |
| 92 | Y-Aib-EGT-αMeF(2F)-TSDVSI-αMeL-LD-Orn-K((2-[2-(2-Amino-ethoxy)-ethoxy]-acetyl)₂-(γ-Glu)-CO-(CH₂)₁₂-CO₂H)AQ-Aib-E-αMeF-I-(D-Glu)-αMeY-LIEGGK((2-[2-(2-Amino-ethoxy)-ethoxy]-acetyl)₂-(γ-Glu)-CO-(CH₂)₁₂-CO₂H)SSGAPPPS-NH₂ | 102 | 5524.19 |
| 93 | Y-Aib-EGT-αMeF(2F)-TSDV-Aib-I-αMeL-LD-Orn-K((2-[2-(2-Amino-ethoxy)-ethoxy]-acetyl)₂-(γ-Glu)-CO-(CH₂)₁₂-CO₂H)AQ-Aib-E-αMeF-I-(D-Glu)-αMeY-LIEGGK((2-[2-(2-Amino-ethoxy)-ethoxy]-acetyl)₂-(γ-Glu)-CO-(CH₂)₁₂-CO₂H)SSGAPPPS-NH₂ | 103 | 5522.22 |
| 94 | Y-Aib-EGT-αMeF(2F)-TSD-Ac5c-SI-αMeL-LD-Orn-K((2-[2-(2-Amino-ethoxy)-ethoxy]-acetyl)₂-(γ-Glu)-CO-(CH₂)₁₂-CO₂H)AQ-Aib-E-αMeF-I-(D-Glu)-αMeY-LIEGGK((2-[2-(2-Amino-ethoxy)-ethoxy]-acetyl)₂-(γ-Glu)-CO-(CH₂)₁₂-CO₂H)SSGAPPPS-NH₂ | 104 | 5536.2 |
| 95 | Y-Aib-EGT-αMeF(2F)-TSD-Ac4c-SI-αMeL-LD-Orn-K((2-[2-(2-Amino-ethoxy)-ethoxy]-acetyl)₂-(γ-Glu)-CO-(CH₂)₁₂-CO₂H)AQ-Aib-EFI-(D-Glu)-αMeY-LIEGGK((2-[2-(2-Amino-ethoxy)-ethoxy]-acetyl)₂-(γ-Glu)-CO-(CH₂)₁₂-CO₂H)SSGAPPPS-NH₂ | 105 | 5508.15 |
| 96 | Y-Aib-EGT-αMeF(2F)-TSD-4CPhe-SI-αMeL-LD-Orn-K((2-[2-(2-Amino-ethoxy)-ethoxy]-acetyl)₂-(γ-Glu)-CO-(CH₂)₁₂-CO₂H)AQ-Aib-EFI-(D-Glu)-αMeY-LIEGGK((2-[2-(2-Amino-ethoxy)-ethoxy]-acetyl)₂-(γ-Glu)-CO-(CH₂)₁₂-CO₂H)SSGAPPPS-NH₂ | 106 | 5602.22 |
| 97 | Y-Aib-EGT-αMeF(2F)-TSD-ChG-SI-αMeL-LD-Orn-K((2-[2-(2-Amino-ethoxy)-ethoxy]-acetyl)₂-(γ-Glu)-CO-(CH₂)₁₂-CO₂H)AQ-Aib-EFI-(D-Glu)-αMeY-LIEGGK((2-[2-(2-Amino-ethoxy)-ethoxy]-acetyl)₂-(γ-Glu)-CO-(CH₂)₁₂-CO₂H)SSGAPPPS-NH₂ | 107 | 5550.23 |
| 98 | Y-Aib-EGT-αMeF(2F)-TSD-ChA-SI-αMeL-LD-Orn-K((2-[2-(2-Amino-ethoxy)-ethoxy]-acetyl)₂-(γ-Glu)-CO-(CH₂)₁₂-CO₂H)AQ-Aib-EFI-(D-Glu)-αMeY-LIEGGK((2-[2-(2-Amino-ethoxy)-ethoxy]-acetyl)₂-(γ-Glu)-CO-(CH₂)₁₂-CO₂H)SSGAPPPS-NH₂ | 108 | 5564.25 |
| 99 | Y-Aib-EGT-αMeF(2F)-TSD-4Pal-SI-αMeL-LD-Orn-K((2-[2-(2-Amino-ethoxy)-ethoxy]-acetyl)₂-(γ-Glu)-CO-(CH₂)₁₂-CO₂H)AQ-Aib-E-2Nal-I-(D-Glu)-αMeY-LIEGGK((2-[2-(2-Amino-ethoxy)-ethoxy]-acetyl)₂-(γ-Glu)-CO-(CH₂)₁₂-CO₂H)SSGAPPPS-NH₂ | 109 | 5609.25 |
| 100 | Y-Aib-EGT-αMeF(2F)-TSD-4Pal-GI-αMeL-LD-Orn-K((2-[2-(2-Amino-ethoxy)-ethoxy]-acetyl)₂-(γ-Glu)-CO-(CH₂)₁₂-CO₂H)AQ-Aib-EFI-(D-Glu)-αMeY-LIEGGK((2-[2-(2-Amino-ethoxy)-ethoxy]-acetyl)₂-(γ-Glu)-CO-(CH₂)₁₂-CO₂H)SSGAPPPS-NH₂ | 110 | 5529.17 |
| 101 | Y-Aib-EGT-αMeF(2F)-TSD-4Pal-SI-αMeL-LDGK((2-[2-(2-Amino-ethoxy)-ethoxy]-acetyl)₂-(γ-Glu)-CO-(CH₂)₁₂-CO₂H)AQ-Aib-EFI-(D-Glu)-αMeY-LIEGGK((2-[2-(2-Amino-ethoxy)-ethoxy]-acetyl)₂-(γ-Glu)-CO-(CH₂)₁₂-CO₂H)SSGAPPPS-NH₂ | 111 | 5502.1 |
| 102 | Y-Aib-EGT-αMeF(2F)-TSD-4Pal-SI-αMeL-LD-Orn-K((2-[2-(2-Amino-ethoxy)-ethoxy]-acetyl)₂-(γ-Glu)-CO-(CH₂)₁₂-CO₂H)GQ-Aib-EFI-(D-Glu)-αMeY-LIEGGK((2-[2-(2-Amino-ethoxy)-ethoxy]-acetyl)₂-(γ-Glu)-CO-(CH₂)₁₂-CO₂H)SSGAPPPS-NH₂ | 112 | 5545.17 |
| 103 | Y-Aib-EGT-αMeF(2F)-TSD-4Pal-SI-αMeL-LD-Orn-K((2-[2-(2-Amino-ethoxy)-ethoxy]-acetyl)₂-(γ-Glu)-CO-(CH₂)₁₂-CO₂H)AQ-Aib-GFI-(D-Glu)-αMeY-LIEGGK((2-[2-(2-Amino-ethoxy)-ethoxy]-acetyl)₂-(γ-Glu)-CO-(CH₂)₁₂-CO₂H)SSGAPPPS-NH₂ | 113 | 5487.13 |
| 104 | Y-Aib-EGT-αMeF(2F)-TSD-4Pal-SI-αMeL-LD-Orn-K((2-[2-(2-Amino-ethoxy)-ethoxy]-acetyl)₂-(γ-Glu)-CO-(CH₂)₁₂-CO₂H)AQ-Aib-EFIG-αMeY-LIEGGK((2-[2-(2-Amino-ethoxy)-ethoxy]-acetyl)₂-(γ-Glu)-CO-(CH₂)₁₂-CO₂H)SSGAPPPS-NH₂ | 114 | 5487.13 |
| 105 | Y-Aib-EGT-αMeF(2F)-TSDK((2-[2-(2-Amino-ethoxy)-ethoxy]-acetyl)₂-(γ-Glu)-CO-(CH₂)₁₂-CO₂H)SI-αMeL-LD-Om-IAQ-Aib-K((2-[2-(2-Amino-ethoxy)-ethoxy]-acetyl)₂-(γ-Glu)-CO-(CH₂)₁₂-CO₂H)FI-(D-Glu)-αMeY-LIEGGPSSGAPPPS-NH₂ | 115 | 5492.19 |
| 106 | Y-Aib-EGT-αMeF(2F)-TSDK((2-[2-(2-Amino-ethoxy)-ethoxy]-acetyl)₂-(γ-Glu)-CO-(CH₂)₁₂-CO₂H)SI-αMeL-LD-Orn-IAQ-Aib-EFIK((2-[2-(2-Amino-ethoxy)-ethoxy]-acetyl)₂-(γ-Glu)-CO-(CH₂)₁₂-CO₂H)-αMeY-LIEGGPSSGAPPPS-NH₂ | 116 | 5492.19 |
| 107 | Y-Aib-EGT-αMeF(2F)-TSDK((2-[2-(2-Amino-ethoxy)-ethoxy]-acetyl)₂-(γ-Glu)-CO-(CH₂)₁₂-CO₂H)SI-αMeL-LD-Orn-IAQ-Aib-EFI-(D-Glu)-αMeY-LIK((2-[2-(2-Amino-ethoxy)-ethoxy]-acetyl)₂-(γ-Glu)-CO-(CH₂)₁₂-CO₂H)GGPSSGAPPPS-NH₂ | 117 | 5492.19 |
| 108 | Y-Aib-EGT-αMeF(2F)-TSDK((2-[2-(2-Amino-ethoxy)-ethoxy]-acetyl)₂-(γ-Glu)-CO-(CH₂)₁₂-CO₂H)SI-αMeL-LD-Orn-IAQ-Aib-EFI-(D-Glu)-αMeY-LIEGGK((2-[2-(2-Amino-ethoxy)-ethoxy]-acetyl)₂-(γ-Glu)-CO-(CH₂)₁₂-CO₂H)SSGAPPPS-NH₂ | 118 | 5524.19 |
| 109 | Y-Aib-EGT-αMeF(2F)-TSDK((2-[2-(2-Amino-ethoxy)-ethoxy]-acetyl)₂-(γ-Glu)-CO-(CH₂)₁₂-CO₂H)SI-αMeL-LD-Om-IAQ-Aib-K((2-[2-(2-Amino-ethoxy)-ethoxy]-acetyl)₂-(γ-Glu)-CO-(CH₂)₁₂-CO₂H)-αMeF-I-(D-Glu)-αMeY-LIEGGPSSGAPPPS-NH₂ | 119 | 5506.22 |
| 110 | Y-Aib-EGT-αMeF(2F)-TSDK((2-[2-(2-Amino-ethoxy)-ethoxy]-acetyl)₂-(γ-Glu)-CO-(CH₂)₁₂-CO₂H)SI-αMeL-LD-Orn-IAQ-Aib-E-αMeF-IK((2-[2-(2-Amino-ethoxy)-ethoxy]-acetyl)₂-(γ-Glu)-CO-(CH₂)₁₂-CO₂H)-αMeY-LIEGGPSSGAPPPS-NH₂ | 120 | 5506.22 |
| 111 | Y-Aib-EGT-αMeF(2F)-TSDK((2-[2-(2-Amino-ethoxy)-ethoxy]-acetyl)₂-(γ-Glu)-CO-(CH₂)₁₂-CO₂H)SI-αMeL-LD-Orn-IAQ-Aib-E-αMeF-I-(D-Glu)-αMeY-LIK((2-[2-(2-Amino-ethoxy)-ethoxy]-acetyl)₂-(γ-Glu)-CO-(CH₂)₁₂-CO₂H)GGPSSGAPPPS-NH₂ | 121 | 5506.22 |
| 112 | Y-Aib-EGT-αMeF(2F)-TSDK((2-[2-(2-Amino-ethoxy)-ethoxy]-acetyl)₂-(γ-Glu)-CO-(CH₂)₁₂-CO₂H)SI-αMeL-LD-Orn-IAQ-Aib-E-αMeF-I-(D-Glu)-αMeY-LIEGGK((2-[2-(2-Amino-ethoxy)-ethoxy]-acetyl)₂-(γ-Glu)-CO-(CH₂)₁₂-CO₂H)SSGAPPPS-NH₂ | 122 | 5538.22 |
| 113 | Y-Aib-EGT-αMeF(2F)-TSD-4Pal-Aib-I-αMeL-LD-Orn-K((2-[2-(2-Amino-ethoxy)-ethoxy]-acetyl)₂-(γ-Glu)-CO-(CH₂)₁₂-CO₂H)AQ-Aib-EFIK((2-[2-(2-Amino-ethoxy)-ethoxy]-acetyl)₂-(γ-Glu)-CO-(CH₂)₁₂-CO₂H)-αMeY-LIEGGPSSGAPPPS-NH₂ | 123 | 5525.22 |
| 114 | Y-Aib-EGT-αMeF(2F)-TSDVSI-αMeL-LD-Orn-K((2-[2-(2-Amino-ethoxy)-ethoxy]-acetyl)₂-(γ-Glu)-CO-(CH₂)₁₂-CO₂H)AQ-Aib-EFIK((2-[2-(2-Amino-ethoxy)-ethoxy]-acetyl)₂-(γ-Glu)-CO-(CH₂)₁₂-CO₂H)-αMeY-LIEGGPSSGAPPPS-NH₂ | 124 | 5478.16 |
| 115 | Y-Aib-EGT-αMeF(2F)-TSDV-Aib-I-αMeL-LD-Orn-K((2-[2-(2-Amino-ethoxy)-ethoxy]-acetyl)₂-(γ-Glu)-CO-(CH₂)₁₂-CO₂H)AQ-Aib-EFIK((2-[2-(2-Amino-ethoxy)-ethoxy]-acetyl)₂-(γ-Glu)-CO-(CH₂)₁₂-CO₂H)-αMeY-LIEGGPSSGAPPPS-NH₂ | 125 | 5476.19 |
| 116 | Y-Aib-EGT-αMeF(2F)-TSD-Ac5c-SI-αMeL-LD-Orn-K((2-[2-(2-Amino-ethoxy)-ethoxy]-acetyl)₂-(γ-Glu)-CO-(CH₂)₁₂-CO₂H)AQ-Aib-EFIK((2-[2-(2-Amino-ethoxy)-ethoxy]-acetyl)₂-(γ-Glu)-CO-(CH₂)₁₂-CO₂H)-αMeY-LIEGGPSSGAPPPS-NH₂ | 126 | 5490.18 |
| 117 | Y-Aib-EGT-αMeF(2F)-TSD-4Pal-Aib-I-αMeL-LD-Orn-K((2-[2-(2-Amino-ethoxy)-ethoxy]-acetyl)₂-(γ-Glu)-CO-(CH₂)₁₂-CO₂H)AQ-Aib-E-αMeF-IK((2-[2-(2-Amino-ethoxy)-ethoxy]-acetyl)₂-(γ-Glu)-CO-(CH₂)₁₂-CO₂H)-αMeY-LIEGGPSSGAPPPS-NH₂ | 127 | 5539.25 |
| 118 | Y-Aib-EGT-αMeF(2F)-TSDVSI-αMeL-LD-Orn-K((2-[2-(2-Amino-ethoxy)-ethoxy]-acetyl)₂-(γ-Glu)-CO-(CH₂)₁₂-CO₂H)AQ-Aib-E-αMeF-IK((2-[2-(2-Amino-ethoxy)-ethoxy]-acetyl)₂-(γ-Glu)-CO-(CH₂)₁₂-CO₂H)-αMeY-LIEGGPSSGAPPPS-NH₂ | 128 | 5492.19 |
| 119 | Y-Aib-EGT-αMeF(2F)-TSDV-Aib-I-αMeL-LD-Orn-K((2-[2-(2-Amino-ethoxy)-ethoxy]-acetyl)₂-(γ-Glu)-CO-(CH₂)₁₂-CO₂H)AQ-Aib-E-αMeF-IK((2-[2-(2-Amino-ethoxy)-ethoxy]-acetyl)₂-(γ-Glu)-CO-(CH₂)₁₂-CO₂H)-αMeY-LIEGGPSSGAPPPS-NH₂ | 129 | 5490.22 |
| 120 | Y-Aib-EGT-αMeF(2F)-TSD-Ac5c-SI-αMeL-LD-Orn-K((2-[2-(2-Amino-ethoxy)-ethoxy]-acetyl)₂-(γ-Glu)-CO-(CH₂)₁₂-CO₂H)AQ-Aib-E-αMeF-IK((2-[2-(2-Amino-ethoxy)-ethoxy]-acetyl)₂-(γ-Glu)-CO-(CH₂)₁₂-CO₂H)-αMeY-LIEGGPSSGAPPPS-NH₂ | 130 | 5504.2 |
| 121 | Y-Aib-EGT-αMeF(2F)-TSD-4Pal-Aib-I-αMeL-LD-Orn-K((2-[2-(2-Amino-ethoxy)-ethoxy]-acetyl)₂-(γ-Glu)-CO-(CH₂)₁₂-CO₂H)AQ-Aib-E-αMeF-IK((2-[2-(2-Amino-ethoxy)-ethoxy]-acetyl)₂-(γ-Glu)-CO-(CH₂)₁₂-CO₂H)-αMeF-LIEGGPSSGAPPPS-NH₂ | 131 | 5523.25 |
| 122 | Y-Aib-EGT-αMeF(2F)-TSDVSI-αMeL-LD-Orn-K((2-[2-(2-Amino-ethoxy)-ethoxy]-acetyl)₂-(γ-Glu)-CO-(CH₂)₁₂-CO₂H)AQ-Aib-E-αMeF-IK((2-[2-(2-Amino-ethoxy)-ethoxy]-acetyl)₂-(γ-Glu)-CO-(CH₂)₁₂-CO₂H)-αMeF-LIEGGPSSGAPPPS-NH₂ | 132 | 5476.19 |
| 123 | Y-Aib-EGT-αMeF(2F)-TSDV-Aib-I-αMeL-LD-Orn-K((2-[2-(2-Amino-ethoxy)-ethoxy]-acetyl)₂-(γ-Glu)-CO-(CH₂)₁₂-CO₂H)AQ-Aib-E-αMeF-IK((2-[2-(2-Amino-ethoxy)-ethoxy]-acetyl)₂-(γ-Glu)-CO-(CH₂)₁₂-CO₂H)-αMeF-LIEGGPSSGAPPPS-NH₂ | 133 | 5474.22 |
| 124 | Y-Aib-EGT-αMeF(2F)-TSD-Ac5c-SI-αMeL-LD-Orn-K((2-[2-(2-Amino-ethoxy)-ethoxy]-acetyl)₂-(γ-Glu)-CO-(CH₂)₁₂-CO₂H)AQ-Aib-E-αMeF-IK((2-[2-(2-Amino-ethoxy)-ethoxy]-acetyl)₂-(γ-Glu)-CO-(CH₂)₁₂-CO₂H)-αMeF-LIEGGPSSGAPPPS-NH₂ | 134 | 5488.2 |
| 125 | Y-Aib-EGT-αMeF(2F)-TSD-4Pal-SI-αMeL-LD-Orn-K((2-[2-(2-Amino-ethoxy)-ethoxy]-acetyl)₂-(γ-Glu)-(7-(4-carboxyphenoxy)heptanoyl))AQ-Aib-EFI-(D-Glu)-αMeY-LIEGGK((2-[2-(2-Amino-ethoxy)-ethoxy]-acetyl)₂-(γ-Glu)-(7-(4-carboxyphenoxy)heptanoyl))SSGAPPPS-NH₂ | 135 | 5575.07 |
| 126 | Y-Aib-EGT-αMeF(2F)-TSD-4Pal-SI-αMeL-LD-Orn-K((2-[2-(2-Amino-ethoxy)-ethoxy]-acetyl)₂-(γ-Glu)-(8-(4-carboxyphenoxy)octanoyl))AQ-Aib-EFI-(D-Glu)-αMeY-LIEGGK((2-[2-(2-Amino-ethoxy)-ethoxy]-acetyl)₂-(γ-Glu)-(8-(4-carboxyphenoxy)octanoyl))SSGAPPPS-NH₂ | 136 | 5603.12 |
| 127 | Y-Aib-EGT-αMeF(2F)-TSD-4Pal-SI-αMeL-LD-Orn-K((2-[2-(2-Amino-ethoxy)-ethoxy]-acetyl)₂-(γ-Glu)-(10-(4-carboxyphenoxy)decanoyl))AQ-Aib-K((2-[2-(2-Amino-ethoxy)-ethoxy]-acetyl)₂-(γ-Glu)-(10-(4-carboxyphenoxy)decanoyl))FI-(D-Glu)-αMeY-LIEGGPSSGAPPPS-NH₂ | 137 | 5643.27 |
| 128 | Y-Aib-EGT-αMeF(2F)-TSD-4Pal-SI-αMeL-LD-Orn-K((2-[2-(2-Amino-ethoxy)-ethoxy]-acetyl)₂-(γ-Glu)-(10-(4-carboxyphenoxy)decanoyl))AQ-Aib-EFIK((2-[2-(2-Amino-ethoxy)-ethoxy]-acetyl)₂-(γ-Glu)-(10-(4-carboxyphenoxy)decanoyl))-αMeY-LIEGGPSSGAPPPS-NH₂ | 138 | 5627.23 |
| 129 | Y-Aib-EGT-αMeF(2F)-TSD-4Pal-SI-αMeL-LD-Orn-K((2-[2-(2-Amino-ethoxy)-ethoxy]-acetyl)₂-(γ-Glu)-(10-(4-carboxyphenoxy)decanoyl))AQ-Aib-EFI-(D-Glu)-αMeY-LIK((2-[2-(2-Amino-ethoxy)-ethoxy]-acetyl)₂-(γ-Glu)-(10-(4-carboxyphenoxy)decanoyl))GGPSSGAPPPS-NH₂ | 139 | 5627.23 |
| 130 | Y-Aib-EGT-αMeF(2F)-TSDK((2-[2-(2-Amino-ethoxy)-ethoxy]-acetyl)₂-(γ-Glu)-(4-(4-tert-butylphenyl)butanoyl))SI-αMeL-LD-Orn-K((2-[2-(2-Amino-ethoxy)-ethoxy]-acetyl)₂-(γ-Glu)-(4-(4-tert-butylphenyl)butanoyl))AQ-Aib-EFI-(D-Glu)-αMeY-LIEGGPSSGAPPPS-NH₂ | 140 | 5432.05 |
| 131 | Y-Aib-EGT-αMeF(2F)-TSD-4Pal-SI-αMeL-LD-Orn-K((2-[2-(2-Amino-ethoxy)-ethoxy]-acetyl)₂-(γ-Glu)-(4-(4-tert-butylphenyl)butanoyl))AQ-Aib-K((2-[2-(2-Amino-ethoxy)-ethoxy]-acetyl)₂-(γ-Glu)-(4-(4-tert-butylphenyl)butanoyl))FI-(D-Glu)-αMeY-LIEGGPSSGAPPPS-NH₂ | 141 | 5451.1 |
| 132 | Y-Aib-EGT-αMeF(2F)-TSD-4Pal-SI-αMeL-LD-Orn-K((2-[2-(2-Amino-ethoxy)-ethoxy]-acetyl)₂-(γ-Glu)-(4-(4-tert-butylphenyl)butanoyl))AQ-Aib-EFIK((2-[2-(2-Amino-ethoxy)-ethoxy]-acetyl)₂-(γ-Glu)-(4-(4-tert-butylphenyl)butanoyl))-αMeY-LIEGGPSSGAPPPS-NH₂ | 142 | 5451.1 |
| 133 | Y-Aib-EGT-αMeF(2F)-TSD-4Pal-SI-αMeL-LD-Orn-K((2-[2-(2-Amino-ethoxy)-ethoxy]-acetyl)₂-(γ-Glu)-(4-(4-tert-butylphenyl)butanoyl))AQ-Aib-EFI-(D-Glu)-αMeY-LIK((2-[2-(2-Amino-ethoxy)-ethoxy]-acetyl)₂-(γ-Glu)-(4-(4-tert-butylphenyl)butanoyl))GGPSSGAPPPS-NH₂ | 143 | 5451.1 |
| 134 | Y-Aib-EGT-αMeF(2F)-TSD-4Pal-SI-αMeL-LD-Orn-K((2-[2-(2-Amino-ethoxy)-ethoxy]-acetyl)₂-(γ-Glu)-(4-(4-tert-butylphenyl)butanoyl))AQ-Aib-EFI-(D-Glu)-αMeY-LIEGK((2-[2-(2-Amino-ethoxy)-ethoxy]-acetyl)₂-(γ-Glu)-(4-(4-tert- butylphenyl)butanoyl))PSSGAPPPS-NH₂ | 144 | 5523.17 |
| 135 | Y-Aib-EGT-αMeF(2F)-TSD-4Pal-SI-αMeL-LD-Orn-K((2-[2-(2-Amino-ethoxy)-ethoxy]-acetyl)₂-(γ-Glu)-(4-(4-tert-butylphenyl)butanoyl))AQ-Aib-EFI-(D-Glu)-αMeY-LIEGGPSSGAPPPSK((2-[2-(2-Amino-ethoxy)-ethoxy]-acetyl)₂-(γ-Glu)-(4-(4-tert-butylphenyl)butanoyl))-NH₂ | 145 | 5580.22 |
| 136 | Y-Aib-EGT-αMeF(2F)-TSDK((2-[2-(2-Amino-ethoxy)-ethoxy]-acetyl)₂-(γ-Glu)-CO-(CH₂)₁₀-CH₃)SI-αMeL-LD-Orn-K((2-[2-(2-Amino-ethoxy)-ethoxy]-acetyl)₂-(γ-Glu)-CO-(CH₂)₁₀-CH₃)AQ-Aib-EFI-(D-Glu)-αMeY-LIEGGPSSGAPPPS-NH₂ | 146 | 5392.08 |
| 137 | Y-Aib-EGT-αMeF(2F)-TSD-4Pal-SI-αMeL-LD-Orn-K((2-[2-(2-Amino-ethoxy)-ethoxy]-acetyl)₂-(γ-Glu)-CO-(CH₂)₁₀-CH₃)AQ-Aib-K((2-[2-(2-Amino-ethoxy)-ethoxy]-acetyl)₂-(γ-Glu)-CO-(CH₂)₁₀-CH₃)FI-(D-Glu)-αMeY-LIEGGPSSGAPPPS-NH₂ | 147 | 5411.12 |
| 138 | Y-Aib-EGT-αMeF(2F)-TSD-4Pal-SI-αMeL-LD-Orn-K((2-[2-(2-Amino-ethoxy)-ethoxy]-acetyl)₂-(γ-Glu)-CO-(CH₂)₁₀-CH₃)AQ-Aib-EFIK((2-[2-(2-Amino-ethoxy)-ethoxy]-acetyl)₂-(γ-Glu)-CO-(CH₂)₁₀-CH₃)-αMeY-LIEGGPSSGAPPPS-NH₂ | 148 | 5411.12 |
| 139 | Y-Aib-EGT-αMeF(2F)-TSD-4Pal-SI-αMeL-LD-Orn-K((2-[2-(2-Amino-ethoxy)-ethoxy]-acetyl)₂-(γ-Glu)-CO-(CH₂)₁₀-CH₃)AQ-Aib-EFI-(D-Glu)-αMeY-LIK((2-[2-(2-Amino-ethoxy)-ethoxy]-acetyl)₂-(γ-Glu)-CO-(CH₂)₁₀-CH₃)GGPSSGAPPPS-NH₂ | 149 | 5411.12 |
| 140 | Y-Aib-EGT-αMeF(2F)-TSD-4Pal-SI-αMeL-LD-Orn-K((2-[2-(2-Amino-ethoxy)-ethoxy]-acetyl)₂-(γ-Glu)-CO-(CH₂)₁₀-CH₃)AQ-Aib-EFI-(D-Glu)-αMeY-LIEGK((2-[2-(2-Amino-ethoxy)-ethoxy]-acetyl)₂-(γ-Glu)-CO-(CH₂)₁₀-CH₃)PSSGAPPPS-NH₂ | 150 | 5483.19 |
| 141 | Y-Aib-EGT-αMeF(2F)-TSD-4Pal-SI-αMeL-LD-Orn-K((2-[2-(2-Amino-ethoxy)-ethoxy]-acetyl)₂-(γ-Glu)-CO-(CH₂)₁₀-CH₃)AQ-Aib-EFI-(D-Glu)-αMeY-LIEGGP S SGAPPP SK((2-[2-(2-Amino-ethoxy)-ethoxy]-acetyl)₂-(γ-Glu)-CO-(CH₂)₁₀-CH₃)-NH₂ | 151 | 5540.24 |
| 142 | Y-Aib-EGT-αMeF(2F)-TSD-Bzt-SI-αMeL-LD-Orn-K((2-[2-(2-Amino-ethoxy)-ethoxy]-acetyl)₂-(γ-Glu)-CO-(CH₂)₁₂-CO₂H)AQ-Aib-EFI-(D-Glu)-αMeY-LIEGGK((2-[2-(2-Amino-ethoxy)-ethoxy]-acetyl)₂-(γ-Glu)-CO-(CH₂)₁₂-CO₂H)SSGAPPPS-NH₂ | 152 | 5614.29 |
| 143 | Y-Aib-EGT-αMeF(2F)-TSD-2FA-SI-αMeL-LD-Orn-K((2-[2-(2-Amino-ethoxy)-ethoxy]-acetyl)₂-(γ-Glu)-CO-(CH₂)₁₂-CO₂H)AQ-Aib-EFI-(D-Glu)-αMeY-LIEGGK((2-[2-(2-Amino-ethoxy)-ethoxy]-acetyl)₂-(γ-Glu)-CO-(CH₂)₁₂-CO₂H)SSGAPPPS-NH₂ | 153 | 5548.17 |
| 144 | Y-Aib-EGT-αMeF(2F)-TSD-4TAA-SI-αMeL-LD-Orn-K((2-[2-(2-Amino-ethoxy)-ethoxy]-acetyl)₂-(γ-Glu)-CO-(CH₂)₁₂-CO₂H)AQ-Aib-EFI-(D-Glu)-αMeY-LIEGGK((2-[2-(2-Amino-ethoxy)-ethoxy]-acetyl)₂-(γ-Glu)-CO-(CH₂)₁₂-CO₂H)SSGAPPPS-NH₂ | 154 | 5565.22 |
| 145 | Y-Aib-EGT-αMeF(2F)-TSD-2TA-SI-αMeL-LD-Orn-K((2-[2-(2-Amino-ethoxy)-ethoxy]-acetyl)₂-(γ-Glu)-CO-(CH₂)₁₂-CO₂H)AQ-Aib-EFI-(D-Glu)-αMeY-LIEGGK((2-[2-(2-Amino-ethoxy)-ethoxy]-acetyl)₂-(γ-Glu)-CO-(CH₂)₁₂-CO₂H)SSGAPPPS-NH₂ | 155 | 5564.23 |
| 146 | Y-Aib-EGT-αMeF(2F)-TSD-3TA-SI-αMeL-LD-Orn-K((2-[2-(2-Amino-ethoxy)-ethoxy]-acetyl)₂-(γ-Glu)-CO-(CH₂)₁₂-CO₂H)AQ-Aib-EFI-(D-Glu)-αMeY-LIEGGK((2-[2-(2-Amino-ethoxy)-ethoxy]-acetyl)₂-(γ-Glu)-CO-(CH₂)₁₂-CO₂H)SSGAPPPS-NH₂ | 156 | 5564.23 |
| 147 | Y-Aib-EGT-αMeF(2F)-TSD-4Pal-SI-αMeL-LD-Orn-K((2-[2-(2-Amino-ethoxy)-ethoxy]-acetyl)₂-(γ-Glu)-CO-(CH₂)₁₂-CO₂H)AQ-Aib-E-Bzt-I-(D-Glu)-αMeY-LIEGGK((2-[2-(2-Amino-ethoxy)-ethoxy]-acetyl)₂-(γ- Glu)-CO-(CH₂)₁₂-CO₂H)SSGAPPPS-NH₂ | 157 | 5615.28 |
| 148 | Y-Aib-EGT-αMeF(2F)-TSD-4Pal-SI-αMeL-LD-Orn-K((2-[2-(2-Amino-ethoxy)-ethoxy]-acetyl)₂-(γ-Glu)-CO-(CH₂)₁₂-CO₂H)AQ-Aib-E-ChA-I-(D-Glu)-αMeY-LIEGGK((2-[2-(2-Amino-ethoxy)-ethoxy]-acetyl)₂-(γ-Glu)-CO-(CH₂)₁₂-CO₂H)SSGAPPPS-NH₂ | 158 | 5565.24 |
| 149 | Y-Aib-EGT-αMeF(2F)-TSD-4Pal-SI-αMeL-LD-Orn-K((2-[2-(2-Amino-ethoxy)-ethoxy]-acetyl)₂-(γ-Glu)-CO-(CH₂)₁₂-CO₂H)AQ-Orn-EFI-(D-Glu)-αMeY-LIEGGK((2-[2-(2-Amino-ethoxy)-ethoxy]-acetyl)₂-(γ-Glu)-CO-(CH₂)₁₂-CO₂H)SSGAPPPS-NH₂ | 159 | 5588.24 |
| 150 | Y-Aib-EGT-αMeF(2F)-TSD-4Pal-SI-αMeL-LD-Orn-K((2-[2-(2-Amino-ethoxy)-ethoxy]-acetyl)₂-(γ-Glu)-CO-(CH₂)₁₂-CO₂H)AQ-Aib-Orn-FI-(D-Glu)-αMeY-LIEGGK((2-[2-(2-Amino-ethoxy)-ethoxy]-acetyl)₂-(γ-Glu)-CO-(CH₂)₁₂-CO₂H)SSGAPPPS-NH₂ | 160 | 5544.23 |
| 151 | Y-Aib-EGT-αMeF(2F)-TSD-4Pal-SI-αMeL-LD-Orn-K((2-[2-(2-Amino-ethoxy)-ethoxy]-acetyl)₂-(γ-Glu)-CO-(CH₂)₁₂-CO₂H)AQ-Aib-EFI-(D-Glu)-αMeY-LI-Orn-GGK((2-[2-(2-Amino-ethoxy)-ethoxy]-acetyl)₂-(γ-Glu)-CO-(CH₂)₁₂-CO₂H)SSGAPPPS-NH₂ | 161 | 5544.23 |
| 152 | Y-Aib-EGT-αMeF(2F)-TSD-4Pal-SI-αMeL-LD-Orn-K((2-[2-(2-Amino-ethoxy)-ethoxy]-acetyl)₂-(γ-Glu)-CO-(CH₂)₁₂-CO₂H)AQ-Aib-EFI-(D-Glu)-αMeY-LIEG-Orn-K((2-[2-(2-Amino-ethoxy)-ethoxy]-acetyl)₂-(γ-Glu)-CO-(CH₂)₁₂-CO₂H)SSGAPPPS-NH₂ | 162 | 5616.29 |
| 153 | Y-Aib-EGT-αMeF(2F)-TSD-4Pal-SI-αMeL-LD-Orn-K((2-[2-(2-Amino-ethoxy)-ethoxy]-acetyl)₂-(γ-Glu)-CO-(CH₂)₁₂-CO₂H)AQ-Aib-EFI-(D-Glu)-αMeY-LIEGGK((2-[2-(2-Amino-ethoxy)-ethoxy]-acetyl)₂-(γ-Glu)-CO-(CH₂)₁₂-CO₂H)SSG-Orn-PPPS-NH₂ | 163 | 5602.26 |
| 154 | Y-Aib-EGT-αMeF(2F)-TSD-4Pal-SI-αMeL-LD-Orn-K((2-[2-(2-Amino-ethoxy)-ethoxy]-acetyl)₂-(γ-Glu)-CO-(CH₂)₁₂-CO₂H)AQ-Aib-EFI-(D-Glu)-αMeY-LIEGGK((2-[2-(2-Amino-ethoxy)-ethoxy]-acetyl)₂-(γ-Glu)-CO-(CH₂)₁₂-CO₂H)SSGAPPP-Orn-NH₂ | 164 | 5586.26 |
| 155 | Y-Aib-EGT-αMeF(2F)-TSD-4Pal-SI-αMeL-LD-Orn-K((2-[2-(2-Amino-ethoxy)-ethoxy]-acetyl)₂-(γ-Glu)-CO-(CH₂)₁₂-CO₂H)AQ-Aib-EFI-(D-Glu)-αMeY-LIEGGK((2-[2-(2-Amino-ethoxy)-ethoxy]-acetyl)₂-(γ-Glu)-CO-(CH₂)₁₂-CO₂H)SSG-Orn-PPP-Orn-NH₂ | 165 | 5629.33 |
| 156 | Y-Aib-EGT-αMeF(2F)-TSD-4Pal-SI-αMeL-LD-Orn-K((2-[2-(2-Amino-ethoxy)-ethoxy]-acetyl)₂-(γ-Glu)-CO-(CH₂)₁₂-CO₂H)AQ-4Pal-EFI-(D-Glu)-αMeY-LIEGGK((2-[2-(2-Amino-ethoxy)-ethoxy]-acetyl)₂-(γ-Glu)-CO-(CH₂)₁₂-CO₂H)SSGAPPPS-NH₂ | 166 | 5622.25 |
| 157 | Y-Aib-EGT-αMeF(2F)-TSD-4Pal-SI-αMeL-LD-Orn-K((2-[2-(2-Amino-ethoxy)-ethoxy]-acetyl)₂-(γ-Glu)-CO-(CH₂)ᵢ₂-CO₂H)AQ-Aib-4Pal-FI-(D-Glu)-αMeY-LIEGGK((2-[2-(2-Amino-ethoxy)-ethoxy]-acetyl)₂-(γ-Glu)-CO-(CH₂)₁₂-CO₂H)SSGAPPPS-NH₂ | 167 | 5578.24 |
| 158 | Y-Aib-EGT-αMeF(2F)-TSD-4Pal-SI-αMeL-LD-Orn-K((2-[2-(2-Amino-ethoxy)-ethoxy]-acetyl)₂-(γ-Glu)-CO-(CH₂)₁₂-CO₂H)AQ-Aib-EFIE-αMeY-LIEGGK((2-[2-(2-Amino-ethoxy)-ethoxy]-acetyl)₂-(γ-Glu)-CO-(CH₂)₁₂-CO₂H)SSGAPPPS-NH₂ | 168 | 5559.19 |
| 159 | Y-Aib-EGT-αMeF(2F)-TSD-4Pal-SI-αMeL-LD-Orn-K((2-[2-(2-Amino-ethoxy)-ethoxy]-acetyl)₂-(γ-Glu)-CO-(CH₂)₁₂-CO₂H)AQ-Aib-EFIE-αMeF-LIEGGK((2-[2-(2-Amino-ethoxy)-ethoxy]-acetyl)₂-(γ-Glu)-CO-(CH₂)₁₂-CO₂H)SSGAPPPS-NH₂ | 169 | 5543.19 |
| 160 | Y-Aib-EGT-αMeF(2F)-TSD-4Pal-SI-αMeL-LD-Orn-K((2-[2-(2-Amino-ethoxy)-ethoxy]-acetyl)₂-(εK)-CO-(CH₂)₁₂-CO₂H)AQ-Aib-EFIK((2-[2-(2-Amino-ethoxy)-ethoxy]-acetyl)₂-(εK)-CO-(CH₂)₁₂-CO₂H)-αMeY-LIEGGPSSGAPPPS-NH₂ | 170 | 5525.31 |
| 161 | Y-Aib-EGT-aMeF(2F)-TSD-4Pal-SI-aMeL-LD-Orn-K(eK-gE-C14_OH)AQ-Aib-EFIK(eK-gE-C14_OH)-αMeY-LIEGGPSSGAPPPS-NH₂ | 171 | 5202.91 |
| 162 | Y-Aib-EGT-αMeF(2F)-TSD-4Pal-SI-αMeL-LD-Orn-K((εK)-(εK)-(γ-Glu)-CO-(CH₂)₁₂-CO₂H)AQ-Aib-EFIK((εK)-(εK)-(γ-Glu)-CO-(CH₂)₁₂-CO₂H)-αMeY-LIEGGPSSGAPPPS-NH₂ | 172 | 5459.26 |
| 163 | Y-Aib-EGT-αMeF(2F)-TSDV-Aib-I-αMeL-LD-Orn-K((2-[2-(2-Amino-ethoxy)-ethoxy]-acetyl)₂-(εK)-CO-(CH₂)₁₂-CO₂H)AQ-Aib-EFI-(D-Glu)-αMeY-LIEGGK((2-[2-(2-Amino-ethoxy)-ethoxy]-acetyl)₂-(εK)-CO-(CH₂)₁₂-CO₂H)SSGAPPPS-NH₂ | 173 | 5506.31 |
| 164 | Y-Aib-EGT-αMeF(2F)-TSDV-Aib-I-αMeL-LD-Orn-K((εK)-(γ-Glu)-CO-(CH₂)₁₂-CO₂H)AQ-Aib-EFI-(D-Glu)-αMeY-LIEGGK((εK)-(γ-Glu)-CO-(CH₂)₁₂-CO₂H)SSGAPPPS-NH₂ | 174 | 5183.91 |
| 165 | Y-Aib-EGT-αMeF(2F)-TSDV-Aib-I-αMeL-LD-Orn-K((εK)-(εK)-(γ-Glu)-CO-(CH₂)₁₂-CO₂H)AQ-Aib-EFI-(D-Glu)-αMeY-LIEGGK((εK)-(εK)-(γ-Glu)-CO-(CH₂)₁₂CO₂H)SSGAPPPS-NH₂ | 175 | 5440.25 |
| 166 | Y-Aib-EGT-αMeF(2F)-TSDV-Aib-I-αMeL-LD-Orn-K((2-[2-(2-Amino-ethoxy)-ethoxy]-acetyl)₂-(εK)-CO-(CH₂)₁₂-CO₂H)AQ-Aib-EFIK((2-[2-(2-Amino-ethoxy)-ethoxy]-acetyl)₂-(εK)-CO-(CH₂)₁₂-CO₂H)-αMeY-LIEGGPSSGAPPPS-NH₂ | 176 | 5474.31 |
| 167 | Y-Aib-EGT-αMeF(2F)-TSDV-Aib-I-αMeL-LD-Orn-K((εK)-(γ-Glu)-CO-(CH₂)₁₂-CO₂H)AQ-Aib-EFIK((εK)-(γ-Glu)-CO-(CH₂)₁₂-CO₂H)-αMeY-LIEGGPSSGAPPPS-NH₂ | 177 | 5151.91 |
| 168 | Y-Aib-EGT-αMeF(2F)-TSDV-Aib-I-αMeL-LD-Orn-K((εK)-(εK)-(γ-Glu)-CO-(CH₂)₁₂-CO₂H)AQ-Aib-EFIK((εK)-(εK)-(γ-Glu)-CO-(CH₂)₁₂-CO₂H)-αMeY-LIEGGPSSGAPPPS-NH₂ | 178 | 5408.25 |
| 169 | Y-Aib-EGT-αMeF(2F)-TSD-4Pal-SI-αMeL-LD-Orn-K((2-[2-(2-Amino-ethoxy)-ethoxy]-acetyl)₂-(γ-Glu)-CO-(CH₂)₁₂-CO₂H)AQ-aMeF-EFI-(D-Glu)-αMeY-LIEGGK((2-[2-(2-Amino-ethoxy)-ethoxy]-acetyl)₂-(γ-Glu)-CO-(CH₂)₁₂-CO₂H)SSGAPPPS-NH₂ | 179 | 5635.29 |
| 170 | Y-Aib-EGT-αMeF(2F)-TSD-4Pal-SI-αMeL-LD-Orn-K((2-[2-(2-Amino-ethoxy)-ethoxy]-acetyl)₂-(γ-Glu)-CO-(CH₂)₁₂-CO₂H)AQ-Ac5c-EFI-(D-Glu)-αMeY-LIEGGK((2-[2-(2-Amino-ethoxy)-ethoxy]-acetyl)₂-(γ-Glu)-CO-(CH₂)₁₂-CO₂H)SSGAPPPS-NH₂ | 180 | 5585.23 |
| 171 | Y-Aib-EGT-αMeF(2F)-TSD-4Pal-SI-αMeL-LD-Orn-K((2-[2-(2-Amino-ethoxy)-ethoxy]-acetyl)₂-(γ-Glu)-CO-(CH₂)₁₂-CO₂H)AQ-Ac6c-EFI-(D-Glu)-αMeY-LIEGGK((2-[2-(2-Amino-ethoxy)-ethoxy]-acetyl)₂-(γ-Glu)-CO-(CH₂)₁₂-CO₂H)SSGAPPPS-NH₂ | 181 | 5599.26 |
| 172 | Y-Aib-EGT-αMeF-TSD-4Pal-SI-αMeL-LD-Orn-K((2-[2-(2-Amino-ethoxy)-ethoxy]-acetyl)₂-(γ-Glu)-CO-(CH₂)₁₀-CH₃)AQ-Aib-EFI-(D-Glu)-αMeY-LIEGGK((2-[2-(2-Amino-ethoxy)-ethoxy]-acetyl)₂-(γ-Glu)-CO-(CH₂)₁₀-CH₃)SSGAPPPS-NH₂ | 182 | 5425.13 |
| 173 | Y-Aib-EGT-αMeF-TSD-4Pal-SI-αMeL-LD-Orn-K((2-[2-(2-Amino-ethoxy)-ethoxy]-acetyl)₂-(γ-Glu)-CO-(CH₂)₁₀-CH₃)AQ-Aib-E-αMeF-I-(D-Glu)-αMeY-LIEGGK((2-[2-(2-Amino-ethoxy)-ethoxy]-acetyl)₂-(γ-Glu)-CO-(CH₂)₁₀-CH₃)SSGAPPPS-NH₂ | 183 | 5439.16 |
| 174 | Y-Aib-EGT-αMeF-TSD-4Pal-SI-αMeL-LD-Orn-K((2-[2-(2-Amino-ethoxy)-ethoxy]-acetyl)₂-(γ-Glu)-CO-(CH₂)₁₀-CH₃)AQ-Aib-E-αMeF-I-(D-Glu)-αMeF-LIEGGK((2-[2-(2-Amino-ethoxy)-ethoxy]-acetyl)₂-(γ-Glu)-CO-(CH₂)₁₀-CH₃)SSGAPPPS-NH₂ | 184 | 5423.16 |
| 175 | Y-Aib-EGT-αMeF(2F)-TSDV-Aib-I-αMeL-LD-Orn-K((2-[2-(2-Amino-ethoxy)-ethoxy]-acetyl)₂-(γ-Glu)-CO-(CH₂)₁₀-CH₃)AQ-Aib-EFI-(D-Glu)-αMeY-LIEGGK((2-[2-(2-Amino-ethoxy)-ethoxy]-acetyl)₂-(γ-Glu)-CO-(CH₂)₁₀-CH₃)SSGAPPPS-NH₂ | 185 | 5392.12 |
| 176 | Y-Aib-EGT-αMeF-TSDV-Aib-I-αMeL-LD-Orn-K((2-[2-(2-Amino-ethoxy)-ethoxy]-acetyl)₂-(γ-Glu)-CO-(CH₂)₁₀-CH₃)AQ-Aib-EFI-(D-Glu)-αMeY-LIEGGK((2-[2-(2-Amino-ethoxy)-ethoxy]-acetyl)₂-(γ-Glu)-CO-(CH₂)₁₀-CH₃)SSGAPPPS-NH₂ | 186 | 5374.13 |
| 177 | Y-Aib-EGT-αMeF(2F)-TSD-V-Aib-I-αMeL-LD-Orn-K((2-[2-(2-Amino-ethoxy)-ethoxy]-acetyl)₂-(γ-Glu)-(4-(4-tert-butylphenyl)butanoyl))AQ-Aib-EFI-(D-Glu)-αMeY-LIEGGK((2-[2-(2-Amino-ethoxy)-ethoxy]-acetyl)₂-(γ-Glu)-(4-(4-tert-butylphenyl)butanoyl))SSGAPPPS-NH₂ | 187 | 5432.1 |
| 178 | Y-Aib-EGT-αMeF-TSD-V-Aib-I-αMeL-LD-Orn-K((2-[2-(2-Amino-ethoxy)-ethoxy]-acetyl)₂-(γ-Glu)-(4-(4-tert-butylphenyl)butanoyl))AQ-Aib-EFI-(D-Glu)-αMeY-LIEGGK((2-[2-(2-Amino-ethoxy)-ethoxy]-acetyl)₂-(γ-Glu)-(4-(4-tert-butylphenyl)butanoyl))SSGAPPPS-NH₂ | 188 | 5414.11 |
| 179 | Y-Aib-EGT-αMeF-TSDVSI-αMeL-LD-Orn-K((2-[2-(2-Amino-ethoxy)-ethoxy]-acetyl)₂-(γ-Glu)-CO-(CH₂)₁₂-CO₂H)AQ-Aib-EFI-(D-Glu)-αMeY-LIEGGK((2-[2-(2-Amino-ethoxy)-ethoxy]-acetyl)₂-(γ-Glu)-CO-(CH₂)₁₂-CO₂H)SSGAPPPS-NH₂ | 189 | 5492.17 |
| 180 | Y-Aib-EGT-αMeF-TSDV-Aib-I-αMeL-LD-Orn-K((2-[2-(2-Amino-ethoxy)-ethoxy]-acetyl)₂-(γ-Glu)-CO-(CH₂)₁₂-CO₂H)AQ-Aib-EFI-(D-Glu)-αMeY-LIEGGK((2-[2-(2-Amino-ethoxy)-ethoxy]-acetyl)₂-(γ-Glu)-CO-(CH₂)₁₂-CO₂H)SSGAPPPS-NH₂ | 190 | 5490.2 |
| 181 | Y-Aib-EGT-αMeF-TSDVSI-αMeL-LD-Orn-K((2-[2-(2-Amino-ethoxy)-ethoxy]-acetyl)₂-(γ-Glu)-CO-(CH₂)₁₂-CO₂H)AQ-Aib-EFIK((2-[2-(2-Amino-ethoxy)-ethoxy]-acetyl)₂-(γ-Glu)-CO-(CH₂)₁₂-CO₂H)-αMeY-LIEGGPSSGAPPPS-NH₂ | 191 | 5460.17 |
| 182 | Y-Aib-EGT-αMeF-TSDV-Aib-I-αMeL-LD-Orn-K((2-[2-(2-Amino-ethoxy)-ethoxy]-acetyl)₂-(γ-Glu)-CO-(CH₂)₁₂-CO₂H)AQ-Aib-EFIK((2-[2-(2-Amino-ethoxy)-ethoxy]-acetyl)₂-(γ-Glu)-CO-(CH₂)₁₂-CO₂H)-αMeY-LIEGGPSSGAPPPS-NH₂ | 192 | 5458.2 |
| 183 | Y-Aib-EGT-αMeF(2F)-TSD-4Pal-SI-αMeL-LD-Orn-K((2-[2-(2-Amino-ethoxy)-ethoxy]-acetyl)₂-(γ-Glu)-CO-(CH₂)₁₂-CO₂H)AQ-Aib-EFI-(D-Glu)-αMeY-LIEGGK((2-[2-(2-Amino-ethoxy)-ethoxy]-acetyl)₂-(γ-Glu)-CO-(CH₂)₁₂-CO₂H)SSG-NH₂ | 193 | 5109.69 |
| 184 | Y-Aib-EGT-αMeF(2F)-TSD-4Pal-SI-αMeL-LD-Orn-K((2-[2-(2-Amino-ethoxy)-ethoxy]-acetyl)₂-(γ-Glu)-CO-(CH₂)₁₂-CO₂H)AQ-Aib-EFI-(D-Glu)-αMeY-LIEGGK((2-[2-(2-Amino-ethoxy)-ethoxy]-acetyl)₂-(γ-Glu)-CO-(CH₂)₁₂-CO₂H)-NH₂ | 194 | 4878.49 |
| 185 | Y-Aib-EGT-αMeF(2F)-TSD-4Pal-SI-αMeL-LD-Orn-K((2-[2-(2-Amino-ethoxy)-ethoxy]-acetyl)₂-(εK)-CO-(CH₂)₁₂-CO₂H)AQ-Aib-EFI-(D-Glu)-αMeY-LIEGGK((2-[2-(2-Amino-ethoxy)-ethoxy]-acetyl)₂-(εK)-CO-(CH₂)₁₂-CO₂H)-NH₂ | 195 | 4876.6 |
| 186 | Y-Aib-EGT-αMeF(2F)-TSD-4Pal-SI-αMeL-LD-Orn-K((εK)-(γ-Glu)-CO-(CH₂)₁₂-CO₂H)AQ-Aib-EFI-(D-Glu)-αMeY-LIEGGK((εK)-(γ-Glu)-CO-(CH₂)₁₂-CO₂H)-NH₂ | 196 | 4554.21 |
| 187 | Y-Aib-EGT-αMeF(2F)-TSD-4Pal-SI-αMeL-LD-Orn-K((εK)-(εK)-(γ-Glu)-CO-(CH₂)₁₂-CO₂H)AQ-Aib-EFI-(D-Glu)-αMeY-LIEGGK((εK)-(εK)-(γ-Glu)-CO-(CH₂)₁₂-CO₂H)-NH₂ | 197 | 4810.55 |
| 188 | Y-Aib-EGT-αMeF(2F)-TSD-4Pal-SI-αMeL-LD-Orn-K((2-[2-(2-Amino-ethoxy)-ethoxy]-acetyl)₂-(γ-Glu)-CO-(CH₂)₁₂-CO₂H)AQ-Aib-EFIK((2-[2-(2-Amino-ethoxy)-ethoxy]-acetyl)₂-(γ-Glu)-CO-(CH₂)₁₂-CO₂H)-αMeY-LIEGGPSSG-NH₂ | 198 | 5077.69 |
| 189 | Y-Aib-EGT-αMeF(2F)-TSD-4Pal-SI-αMeL-LD-Orn-K((2-[2-(2-Amino-ethoxy)-ethoxy]-acetyl)₂-(γ-Glu)-CO-(CH₂)₁₂-CO₂H)AQ-Aib-EFIK((2-[2-(2-Amino-ethoxy)-ethoxy]-acetyl)₂-(γ-Glu)-CO-(CH₂)₁₂-CO₂H)-αMeY-LIEGG-NH₂ | 199 | 4749.37 |
| 190 | Y-Aib-EGT-αMeF(2F)-TSD-4Pal-SI-αMeL-LD-Orn-K((2-[2-(2-Amino-ethoxy)-ethoxy]-acetyl)₂-(γ-Glu)-CO-(CH₂)₁₂-CO₂H)AQ-Aib-EFIK((2-[2-(2-Amino-ethoxy)-ethoxy]-acetyl)₂-(γ-Glu)-CO-(CH₂)₁₂-CO₂H)-αMeY-LIEG-Orn-NH₂ | 200 | 4806.47 |
| 191 | Y-Aib-EGT-αMeF(2F)-TSD-4Pal-SI-αMeL-LD-Orn-IAQ-Aib-K((2-[2-(2-Amino-ethoxy)-ethoxy]-acetyl)₂-CO-(CH₂)₁₂-CO₂H)FIK((2-[2-(2-Amino-ethoxy)-ethoxy]-acetyl)₂-CO-(CH₂)₁₂-CO₂H)-αMeY-LIEGGPSSGAPPPS-NH₂ | 201 | 5253.01 |
| 192 | Y-Aib-EGT-αMeF(2F)-TSD-4Pal-SI-αMeL-LD-Orn-IAQ-Aib-EFIK((2-[2-(2-Amino-ethoxy)-ethoxy]-acetyl)₂-CO-(CH₂)₁₂-CO₂H)-αMeY-LIK((2-[2-(2-Amino-ethoxy)-ethoxy]-acetyl)₂-CO-(CH₂)₁₂-CO₂H)GGPSSGAPPPS-NH₂ | 202 | 5253.01 |
| 193 | Y-Aib-EGT-αMeF(2F)-TSD-4Pal-SI-αMeL-LD-Orn-IAQ-Aib-EFIK((2-[2-(2-Amino-ethoxy)-ethoxy]-acetyl)₂-CO-(CH₂)₁₂-CO₂H)-αMeY-LIEGGK((2-[2-(2-Amino-ethoxy)-ethoxy]-acetyl)₂-CO-(CH₂)₁₂-CO₂H)SSGAPPPS-NH₂ | 203 | 5285.01 |
| 194 | Y-Aib-EGT-αMeF(2F)-TSD-4Pal-SI-αMeL-LD-Orn-IAQ-Aib-EFIK((2-[2-(2-Amino-ethoxy)-ethoxy]-acetyl)₂-CO-(CH₂)₁₂-CO₂H)-αMeY-LIEGGPSSGAPPP SK((2-[2-(2-Amino-ethoxy)-ethoxy]-acetyl)₂-CO-(CH₂)₁₂-CO₂H)-NH₂ | 204 | 5382.13 |
| 195 | Y-Aib-EGT-αMeF(2F)-TSD-4Pal-SI-αMeL-LD-Orn-IAQ-Aib-K((2-[2-(2-Amino-ethoxy)-ethoxy]-acetyl)₂-CO-(CH₂)₁₂-CO₂H)FI-(D-Glu)-αMeY-LIEGGK((2-[2-(2-Amino-ethoxy)-ethoxy]-acetyl)₂-CO-(CH₂)₂-CO₂H)SSGAPPPS-NH₂ | 205 | 5285.01 |
| 196 | Y-Aib-EGT-αMeF(2F)-TSD-4Pal-SI-αMeL-LD-Orn-IAQ-Aib-K((2-[2-(2-Amino-ethoxy)-ethoxy]-acetyl)₂-CO-(CH₂)₁₂-CO₂H)FI-(D-Glu)-αMeY-LIEGGPSSGAPPP SK((2-[2-(2-Amino-ethoxy)-ethoxy]-acetyl)₂-CO-(CH₂)₁₂-CO₂H)-NH₂ | 206 | 5382.13 |
| 197 | Y-Aib-EGT-αMeF(2F)-TSD-4Pal-SI-αMeL-LD-Orn-IAQ-Aib-EFIK((εK)-(γ-Glu)-CO-(CH₂)₁₂-CO₂H)-αMeY-LIEGGK((εK)-(γ-Glu)-CO-(CH₂)₁₂-CO₂H)SSGAPPPS-NH₂ | 207 | 5218.96 |
| 198 | Y-Aib-EGT-αMeF(2F)-TSD-4Pal-SI-αMeL-LD-Orn-IAQ-Aib-EFIK((εK)-(εK)-(γ-Glu)-CO-(CH₂)₁₂-CO₂H)-αMeY-LIEGGK((εK)-(εK)-(γ-Glu)-CO-(CH₂)₁₂-CO₂H)SSGAPPPS-NH₂ | 208 | 5475.3 |
| 199 | Y-Aib-EGT-αMeF(2F)-TSD-4Pal-Dap-I-αMeL-LD-Orn-K((2-[2-(2-Amino-ethoxy)-ethoxy]-acetyl)₂-(γ-Glu)-CO-(CH₂)₁₂-CO₂H)AQ-Aib-EFI-(D-Glu)-αMeY-LIEGGK((2-[2-(2-Amino-ethoxy)-ethoxy]-acetyl)₂-(γ-Glu)-CO-(CH₂)₁₂-CO₂H)SSGAPPPS-NH₂ | 209 | 5558.21 |
| 200 | Y-Aib-EGT-αMeF(2F)-TSDY-Dap-I-αMeL-LD-Orn-K((2-[2-(2-Amino-ethoxy)-ethoxy]-acetyl)₂-(γ-Glu)-CO-(CH₂)₁₂-CO₂H)AQ-Aib-EFI-(D-Glu)-αMeY-LIEGGK((2-[2-(2-Amino-ethoxy)-ethoxy]-acetyl)₂-(γ-Glu)-CO-(CH₂)₁₂-CO₂H)SSGAPPPS-NH₂ | 210 | 5573.22 |
| 201 | Y-Aib-EGT-αMeF(2F)-TSDV-Dap-I-αMeL-LD-Orn-K((2-[2-(2-Amino-ethoxy)-ethoxy]-acetyl)₂-(γ-Glu)-CO-(CH₂)₁₂-CO₂H)AQ-Aib-EFIe-αMeY-LIEGGK((2-[2-(2-Amino-ethoxy)-ethoxy]-acetyl)₂-(γ-Glu)-CO- (CH₂)₁₂-CO₂H)SSGAPPPS-NH₂ | 211 | 5509.18 |
| 202 | Y-Aib-EGT-αMeF(2F)-TSD-4Pal-Tle-I-αMeL-LD-Orn-K((2-[2-(2-Amino-ethoxy)-ethoxy]-acetyl)₂-(γ-Glu)-CO-(CH₂)₁₂-CO₂H)AQ-Aib-EFI-(D-Glu)-αMeY-LIEGGK((2-[2-(2-Amino-ethoxy)-ethoxy]-acetyl)₂-(γ-Glu)-CO-(CH₂)₁₂-CO₂H)SSGAPPPS-NH₂ | 212 | 5585.27 |
| 203 | Y-Aib-EGT-αMeF(2F)-TSD-4Pal-SI-αMeL-LD-Orn-IAQ-Aib-EFIK((2-[2-(2-Amino-ethoxy)-ethoxy]-acetyl)₂-(γ-Glu)-(4-(4-tert-butylphenyl)butanoyl))-αMeY-LIK((2-[2-(2-Amino-ethoxy)-ethoxy]-acetyl)₂-(γ-Glu)-(4-(4-tert-butylphenyl)butanoyl))GGPSSGAPPPS-NH2 | 213 | 5435.15 |
| 204 | Y-Aib-EGT-αMeF(2F)-TSD-4Pal-SI-αMeL-LD-Orn-IAQ-Aib-K((2-[2-(2-Amino-ethoxy)-ethoxy]-acetyl)₂-(γ-Glu)-(4-(4-tert-butylphenyl)butanoyl))FI-(D-Glu)-αMeY-LIK((2-[2-(2-Amino-ethoxy)-ethoxy]-acetyl)₂-(γ-Glu)-(4-(4-tert-butylphenyl)butanoyl))GGPSSGAPPPS-NH2 | 214 | 5435.15 |
| 205 | Y-Aib-EGT-αMeF(2F)-TSD-4Pal-SI-αMeL-LD-Orn-IAQ-Aib-K((2-[2-(2-Amino-ethoxy)-ethoxy]-acetyl)₂-(γ-Glu)-(4-(4-tert-butylphenyl)butanoyl))FI-(D-Glu)-αMeY-LIEGGPSSGAPPPSK((2-[2-(2-Amino-ethoxy)-ethoxy]-acetyl)₂-(γ-Glu)-(4-(4-tert-butylphenyl)butanoyl))-NH2 | 215 | 5564.26 |
| 206 | Y-Aib-EGT-αMeF(2F)-TSD-4Pal-SI-αMeL-LD-Orn-IAQ-Aib-EFI-(D-Glu)-αMeY-LIK((2-[2-(2-Amino-ethoxy)-ethoxy]-acetyl)₂-(γ-Glu)-(4-(4-tert-butylphenyl)butanoyl))GGPSSGAPPPSK((2-[2-(2-Amino-ethoxy)-ethoxy]-acetyl)₂-(γ-Glu)-(4-(4-tert-butylphenyl)butanoyl))-NH2 | 216 | 5564.26 |
| 207 | Y-Aib-EGT-αMeF(2F)-TSD-4Pal-SI-αMeL-LD-Orn-K((2-[2-(2-Amino-ethoxy)-ethoxy]-acetyl)-(γ-Glu)-(4-(4-tert-butylphenyl)butanoyl))AQ-Aib-K((2-[2-(2-Amino-ethoxy)-ethoxy]-acetyl)-(γ-Glu)-(4-(4-tert-butylphenyl)butanoyl))FI-(D-Glu)-αMeY-LIEGGPSSGAPPPS-NH2 | 217 | 5160.79 |
| 208 | Y-Aib-EGT-αMeF(2F)-TSD-4Pal-SI-αMeL-LD-Orn-K((2-[2-(2-Amino-ethoxy)-ethoxy]-acetyl)-(γ-Glu)-(4-(4-tert-butylphenyl)butanoyl))AQ-Aib-EFI-(D-Glu)-αMeY-LIK((2-[2-(2-Amino-ethoxy)-ethoxy]-acetyl)-(γ-Glu)-(4-(4-tert-butylphenyl)butanoyl))GGPSSGAPPPS-NH₂ | 218 | 5160.79 |
| 209 | Y-Aib-EGT-αMeF(2F)-TSD-4Pal-SI-αMeL-LD-Orn-K((2-[2-(2-Amino-ethoxy)-ethoxy]-acetyl)-(γ-Glu)-(4-(4-tert-butylphenyl)butanoyl))AQ-Aib-EFI-(D-Glu)-αMeY-LIEGGPSSGAPPPSK((2-[2-(2-Amino-ethoxy)-ethoxy]-acetyl)-(γ-Glu)-(4-(4-tert-butylphenyl)butanoyl))-NH₂ | 219 | 5289.9 |
| 210 | Y-Aib-EGT-αMeF(2F)-TSD-4Pal-SI-αMeL-LD-Orn-K((2-[2-(2-Amino-ethoxy)-ethoxy]-acetyl)₂-CO-(CH₂)₁₂-CO₂H)AQ-Aib-EFI-(D-Glu)-αMeY-LIK((2-[2-(2-Amino-ethoxy)-ethoxy]-acetyl)₂-CO-(CH₂)₁₂-CO₂H)GGPSSGAPPPS-NH₂ | 220 | 5398.12 |
| 211 | Y-Aib-EGT-αMeF(2F)-TSD-4Pal-Ac5c-I-αMeL-LD-Orn-K((2-[2-(2-Amino-ethoxy)-ethoxy]-acetyl)₂-(γ-Glu)-CO-(CH₂)₁₂-CO₂H)AQ-Aib-EFI-(D-Glu)-αMeY-LIEGGK((2-[2-(2-Amino-ethoxy)-ethoxy]-acetyl)₂-(γ-Glu)-CO-(CH₂)₁₂-CO₂H)SSGAPPPS-NH₂ | 221 | 5583.26 |
| 212 | Y-Aib-EGT-αMeF(2F)-TSDV-αMeS-I-αMeL-LD-Orn-K((2-[2-(2-Amino-ethoxy)-ethoxy]-acetyl)₂-(γ-Glu)-CO-(CH₂)₁₂-CO₂H)AQ-Aib-EFI-(D-Glu)-αMeY-LIEGGK((2-[2-(2-Amino-ethoxy)-ethoxy]-acetyl)₂-(γ-Glu)-CO-(CH₂)₁₂-CO₂H)SSGAPPPS-NH₂ | 222 | 5524.19 |
| 213 | Y-Aib-EGT-αMeF(2F)-TSD-4Pal-αMeS-I-αMeL-LD-Orn-K((2-[2-(2-Amino-ethoxy)-ethoxy]-acetyl)₂-(γ-Glu)-CO-(CH₂)₁₂-CO₂H)AQ-Aib-EFI-(D-Glu)-αMeY-LIEGGK((2-[2-(2-Amino-ethoxy)-ethoxy]-acetyl)₂-(γ-Glu)-CO-(CH₂)₁₂-CO₂H)SSGAPPPS-NH₂ | 223 | 5573.22 |
| 214 | Y-Aib-EGT-αMeF(2F)-TSD-4Pal-αMeS-I-αMeL-LD-Orn-K((2-[2-(2-Amino-ethoxy)-ethoxy]-acetyl)₂-(γ-Glu)-CO-(CH₂)₁₂-CO₂H)AQ-Aib-EFIK((2-[2-(2-Amino-ethoxy)-ethoxy]-acetyl)₂-(γ-Glu)-CO-(CH₂)₁₂-CO₂H)-αMeY-LIEGGPSSGAPPPS-NH₂ | 224 | 5541.22 |
| 215 | Y-Aib-EGT-αMeF(2F)-TSD-4Pal-αMeS-I-αMeL-LD-Orn-IAQ-Aib-K((2-[2-(2-Amino-ethoxy)-ethoxy]-acetyl)₂-(γ-Glu)-CO-(CH₂)₁₂-CO₂H)FIK((2-[2-(2-Amino-ethoxy)-ethoxy]-acetyl)₂-(γ-Glu)-CO-(CH₂)₁₂-CO₂H)-αMeY-LIEGGPSSGAPPPS-NH₂ | 225 | 5525.27 |
| 216 | Y-Aib-EGT-αMeF(2F)-TSD-4Pal-αMeS-I-αMeL-LD-Orn-IAQ-Aib-EFIK((2-[2-(2-Amino-ethoxy)-ethoxy]-acetyl)₂-(γ-Glu)-CO-(CH₂)₁₂-CO₂H)-αMeY-LIK((2-[2-(2-Amino-ethoxy)-ethoxy]-acetyl)₂-(γ-Glu)-CO-(CH₂)₁₂-CO₂H)GGPSSGAPPPS-NH₂ | 226 | 5525.27 |
| 217 | Y-Aib-EGT-αMeF(2F)-TSD-4Pal-αMeS-I-αMeL-LD-Orn-IAQ-Aib-K((2-[2-(2-Amino-ethoxy)-ethoxy]-acetyl)₂-(γ-Glu)-CO-(CH₂)₁₂-CO₂H)FI-(D-Glu)-αMeY-LIK((2-[2-(2-Amino-ethoxy)-ethoxy]-acetyl)₂-(γ-Glu)-CO-(CH₂)₁₂-CO₂H)GGPSSGAPPPS-NH₂ | 227 | 5525.27 |
| 218 | Y-Aib-EGT-αMeF(2F)-TSD-4Pal-Aib-I-αMeL-LD-Orn-IAQ-Aib-K((2-[2-(2-Amino-ethoxy)-ethoxy]-acetyl)₂-(γ-Glu)-CO-(CH₂)₁₂-CO₂H)FIK((2-[2-(2-Amino-ethoxy)-ethoxy]-acetyl)₂-(γ-Glu)-CO-(CH₂)₁₂-CO₂H)-αMeY-LIEGGPSSGAPPPS-NH₂ | 228 | 5509.27 |
| 219 | Y-Aib-EGT-αMeF(2F)-TSD-4Pal-Aib-I-αMeL-LD-Orn-IAQ-Aib-EFIK((2-[2-(2-Amino-ethoxy)-ethoxy]-acetyl)₂-(γ-Glu)-CO-(CH₂)₁₂-CO₂H)-αMeY-LIK((2-[2-(2-Amino-ethoxy)-ethoxy]-acetyl)₂-(γ-Glu)-CO-(CH₂)₁₂-CO₂H)GGPSSGAPPPS-NH₂ | 229 | 5509.27 |
| 220 | Y-Aib-EGT-αMeF(2F)-TSD-4Pal-Aib-I-αMeL-LD-Orn-IAQ-Aib-K((2-[2-(2-Amino-ethoxy)-ethoxy]-acetyl)₂-(γ-Glu)-CO-(CH₂)₁₂-CO₂H)FI-(D-Glu)-αMeY-LIK((2-[2-(2-Amino-ethoxy)-ethoxy]-acetyl)₂-(γ-Glu)-CO-(CH₂)₁₂-CO₂H)GGPSSGAPPPS-NH₂ | 230 | 5509.27 |
| 221 | Y-Aib-EGT-αMeF(2F)-TSD-4Pal-SI-αMeL-LD-Orn-K((2-[2-(2-Amino-ethoxy)-ethoxy]-acetyl)₂-CO-(CH₂)₁₂-CO₂H)AQ-Aib-EFI-(D-Glu)-αMeY-LIEGGPSSGAPPPSK((2-[2-(2-Amino-ethoxy)-ethoxy]-acetyl)₂-CO-(CH₂)₁₂-CO₂H)-NH₂ | 231 | 5398.08 |
| 222 | Y-Aib-EGT-αMeF(2F)-TSD-4Pal-SI-αMeL-LD-Orn-IAQ-Aib-K((2-[2-(2-Amino-ethoxy)-ethoxy]-acetyl)₂-CO-(CH₂)₁₂-CO₂H)Fl-(D-Glu)-αMeY-LIK((2-[2-(2-Amino-ethoxy)-ethoxy]-acetyl)₂-CO-(CH₂)₁₂-CO₂H)GGPSSGAPPPS-NH₂ | 232 | 5253.01 |
| 223 | Y-Aib-EGT-αMeF(2F)-TSD-4Pal-SI-αMeL-LD-Orn-IAQ-Aib-EFI-(D-Glu)-αMeY-LIK((2-[2-(2-Amino-ethoxy)-ethoxy]-acetyl)₂-CO-(CH₂)₁₂-CO₂H)GGPSSGAPPPSK((2-[2-(2-Amino-ethoxy)-ethoxy]-acetyl)₂-CO-(CH₂)₁₂-CO₂H)-NH₂ | 233 | 5382.13 |
| 224 | Y-Aib-EGT-αMeF(2F)-TSD-4Pal-SI-αMeL-LD-Orn-K((2-[2-(2-Amino-ethoxy)-ethoxy]-acetyl)₃-(γ-Glu)-CO-(CH₂)₁₂-CO₂H)AQ-Aib-EFI-(D-Glu)-αMeY-LIK((2-[2-(2-Amino-ethoxy)-ethoxy]-acetyl)₃-(γ-Glu)-CO-(CH₂)₁₂-CO₂H)GGPSSGAPPPS-NH₂ | 234 | 5817.51 |
| 225 | Y-Aib-EGT-αMeF(2F)-TSD-4Pal-SI-αMeL-LD-Orn-K((2-[2-(2-Amino-ethoxy)-ethoxy]-acetyl)₃-(γ-Glu)-CO-(CH₂)₁₂-CO₂H)AQ-Aib-EFI-(D-Glu)-αMeY-LIEGGPSSGAPPPSK((2-[2-(2-Amino-ethoxy)-ethoxy]-acetyl)₃-(γ-Glu)-CO-(CH₂)₁₂-CO₂H)-NH₂ | 235 | 5946.62 |
| 226 | Y-Aib-EGT-αMeF(2F)-TSD-4Pal-SI-αMeL-LD-Orn-IAQ-Aib-EFIK((2-[2-(2-Amino-ethoxy)-ethoxy]-acetyl)₃-(γ-Glu)-CO-(CH₂)₁₂-CO₂H)-αMeY-LIK((2-[2-(2-Amino-ethoxy)-ethoxy]-acetyl)₃-(γ-Glu)-CO-(CH₂)₁₂-CO₂H)GGPSSGAPPPS-NH₂ | 236 | 5801.55 |
| 227 | Y-Aib-EGT-αMeF(2F)-TSD-4Pal-SI-αMeL-LD-Orn-IAQ-Aib-K((2-[2-(2-Amino-ethoxy)-ethoxy]-acetyl)₃-(γ-Glu)-CO-(CH₂)₁₂-CO₂H)FI-(D-Glu)-αMeY-LIK((2-[2-(2-Amino-ethoxy)-ethoxy]-acetyl)₃-(γ-Glu)-CO-(CH₂)₁₂-CO₂H)GGPSSGAPPPS-NH₂ | 237 | 5801.55 |
| 228 | Y-Aib-EGT-αMeF(2F)-TSD-4Pal-SI-αMeL-LD-Orn-IAQ-Aib-K((2-[2-(2-Amino-ethoxy)-ethoxy]-acetyl)₃-(γ-Glu)-CO-(CH₂)₁₂-CO₂H)FI-(D-Glu)-αMeY-LIEGGPSSGAPPPSK((2-[2-(2-Amino-ethoxy)-ethoxy]-acetyl)₃-(γ-Glu)-CO-(CH₂)₁₂-CO₂H)-NH₂ | 238 | 5930.67 |
| 229 | Y-Aib-EGT-αMeF(2F)-TSD-4Pal-SI-αMeL-LD-Orn-IAQ-Aib-EFI-(D-Glu)-αMeY-LIK((2-[2-(2-Amino-ethoxy)-ethoxy]-acetyl)₃-(γ-Glu)-CO-(CH₂)₁₂-CO₂H)GGPSSGAPPPSK((2-[2-(2-Amino-ethoxy)-ethoxy]-acetyl)₃-(γ-Glu)-CO-(CH₂)₁₂-CO₂H)-NH₂ | 239 | 5930.67 |
| 230 | Y-Aib-EGT-αMeF(2F)-TSDY-Aib-I-αMeL-LD-Orn-K((2-[2-(2-Amino-ethoxy)-ethoxy]-acetyl)₂-(γ-Glu)-CO-(CH₂)₁₂-CO₂H)AQ-Aib-K((2-[2-(2-Amino-ethoxy)-ethoxy]-acetyl)₂-(γ-Glu)-CO-(CH₂)₁₂-CO₂H)FI-(D-Glu)-αMeY-LIEGGPSSGAPPPS-NH₂ | 240 | 5540.23 |
| 231 | Y-Aib-EGT-αMeF(2F)-TSDY-Aib-I-αMeL-LD-Orn-K((2-[2-(2-Amino-ethoxy)-ethoxy]-acetyl)₂-(γ-Glu)-CO-(CH₂)₁₂-CO₂H)AQ-Aib-EFI-(D-Glu)-αMeY-LIK((2-[2-(2-Amino-ethoxy)-ethoxy]-acetyl)₂-(γ-Glu)-CO-(CH₂)₁₂-CO₂H)GGPSSGAPPPS-NH₂ | 241 | 5540.23 |
| 232 | Y-Aib-EGT-αMeF(2F)-TSDY-Aib-I-αMeL-LD-Orn-K((2-[2-(2-Amino-ethoxy)-ethoxy]-acetyl)₂-(γ-Glu)-CO-(CH₂)₁₂-CO₂H)AQ-Aib-EFI-(D-Glu)-αMeY-LIEGGPSSGAPPPSK((2-[2-(2-Amino-ethoxy)-ethoxyl-acetyl)₂-(γ-Glu)-CO-(CH₂)₁₂-CO₂H)-NH₂ | 242 | 5669.35 |
| 233 | Y-Aib-EGT-αMeF(2F)-TSDY-Aib-I-αMeL-LD-Orn-IAQ-Aib-EFIK((2-[2-(2-Amino-ethoxy)-ethoxy]-acetyl)₂-(γ-Glu)-CO-(CH₂)₁₂-CO₂H)-αMeY-LIK((2-[2-(2-Amino-ethoxy)-ethoxy]-acetyl)₂-(γ-Glu)-CO-(CH₂)₁₂-CO₂H)GGPSSGAPPPS-NH₂ | 243 | 5524.28 |
| 234 | Y-Aib-EGT-αMeF(2F)-TSDY-Aib-I-αMeL-LD-Orn-IAQ-Aib-K((2-[2-(2-Amino-ethoxy)-ethoxy]-acetyl)₂-(γ-Glu)-CO-(CH₂)₁₂-CO₂H)Fl-(D-Glu)-αMeY-LIK((2-[2-(2-Amino-ethoxy)-ethoxy]-acetyl)₂-(γ-Glu)-CO-(CH₂)₁₂-CO₂H)GGPSSGAPPPS-NH₂ | 244 | 5524.28 |
| 235 | Y-Aib-EGT-aMeF(2F)-TSDY-Aib-I-aMeL-LD-Orn-IAQ-Aib-K((2-[2-(2-Amino-ethoxy)-ethoxy]-acetyl)₂-(γ-Glu)-CO-(CH₂)₁₂-CO₂H)FI-(D-Glu)-αMeY-LIEGGPSSGAPPPSK((2-[2-(2-Amino-ethoxy)-ethoxy]-acetyl)₂-(γ-Glu)-CO-(CH₂)₁₂-CO₂H)-NH₂ | 245 | 5653.39 |
| 236 | Y-Aib-EGT-αMeF(2F)-TSDY-Aib-I-αMeL-LD-Orn-K((2-[2-(2-Amino-ethoxy)-ethoxy]-acetyl)₂-(γ-Glu)-(10-(4-carboxyphenoxy)decanoyl))AQ-Aib-K((2-[2-(2-Amino-ethoxy)-ethoxy]-acetyl)₂-(γ-Glu)-(10-(4-carboxyphenoxy)decanoyl))FI-(D-Glu)-αMeY-LIEGGPSSGAPPPS-NH₂ | 246 | 5640.27 |
| 237 | Y-Aib-EGT-αMeF(2F)-TSDY-Aib-I-αMeL-LD-Orn-K((2-[2-(2-Amino-ethoxy)-ethoxy]-acetyl)₂-(γ-Glu)-(10-(4-carboxyphenoxy)decanoyl))AQ-Aib-EFI-(D-Glu)-αMeY-LIK((2-[2-(2-Amino-ethoxy)-ethoxy]-acetyl)₂-(γ-Glu)-(10-(4-carboxyphenoxy)decanoyl))GGPSSGAPPPS-NH₂ | 247 | 5640.27 |
| 238 | Y-Aib-EGT-αMeF(2F)-TSDY-Aib-I-αMeL-LD-Orn-K((2-[2-(2-Amino-ethoxy)-ethoxy]-acetyl)₂-(γ-Glu)-(10-(4-carboxyphenoxy)decanoyl))AQ-Aib-EFI-(D-Glu)-αMeY-LIEGGPSSGAPPPSK((2-[2-(2-Amino-ethoxy)-ethoxy]-acetyl)₂-(γ-Glu)-(10-(4-carboxyphenoxy)decanoyl))-NH₂ | 248 | 5769.38 |
| 239 | Y-Aib-EGT-αMeF(2F)-TSDY-Aib-I-αMeL-LD-Orn-IAQ-Aib-EFIK((2-[2-(2-Amino-ethoxy)-ethoxy]-acetyl)₂-(γ-Glu)-(10-(4-carboxyphenoxy)decanoyl))-αMeY-LIK((2-[2-(2-Amino-ethoxy)-ethoxy]-acetyl)₂-(γ-Glu)-(10-(4-carboxyphenoxy)decanoyl))GGPSSGAPPPS-NH₂ | 249 | 5624.31 |
| 240 | Y-Aib-EGT-αMeF(2F)-TSDY-Aib-I-αMeL-LD-Orn-IAQ-Aib-K((2-[2-(2-Amino-ethoxy)-ethoxy]-acetyl)₂-(γ-Glu)-(10-(4-carboxyphenoxy)decanoyl))FI-(D-Glu)-αMeY-LIK((2-[2-(2-Amino-ethoxy)-ethoxy]-acetyl)₂-(γ-Glu)-(10-(4-carboxyphenoxy)decanoyl))GGPSSGAPPPS-NH₂ | 250 | 5624.31 |
| 241 | Y-Aib-EGT-αMeF(2F)-TSDY-Aib-I-αMeL-LD-Orn-IAQ-Aib-K((2-[2-(2-Amino-ethoxy)-ethoxy]-acetyl)₂-(γ-Glu)-(10-(4-carboxyphenoxy)decanoyl))FI-(D-Glu)-αMeY-LIEGGPSSGAPPPSK((2-[2-(2-Amino-ethoxy)-ethoxy]-acetyl)₂-(γ-Glu)-(10-(4-carboxyphenoxy)decanoyl))-NH₂ | 251 | 5753.42 |
| 242 | Y-Aib-EGT-αMeF(2F)-TSD-4Pal-Aib-I-αMeL-LD-Orn-IAQ-Aib-K((2-[2-(2-Amino-ethoxy)-ethoxy]-acetyl)₂-(γ-Glu)-(11-(4-carboxyphenoxy)undecanoyl)FI-(D-Glu)-αMeY-LIEGGPSSGAPPPSK((2-[2-(2-Amino-ethoxy)-ethoxy]-acetyl)₂-(γ-Glu)-(11-(4-carboxyphenoxy)undecanoyl)-NH₂ | 252 | 5766.46 |
| 243 | Y-Aib-EGT-αMeF(2F)-TSD-4Pal-Aib-I-αMeL-LD-Orn-K((2-[2-(2-Amino-ethoxy)-ethoxy]-acetyl)₂-(γ-Glu)-(10-(4-carboxyphenoxy)decanoyl))AQ-Aib-K((2-[2-(2-Amino-ethoxy)-ethoxy]-acetyl)₂-(γ-Glu)-(10-(4-carboxyphenoxy)decanoyl))FI-(D-Glu)-αMeY-LIEGGPSSGAPPPS-NH₂ | 253 | 5625.25 |
| 244 | Y-Aib-EGT-αMeF(2F)-TSD-4Pal-Aib-I-αMeL-LD-Orn-K((2-[2-(2-Amino-ethoxy)-ethoxy]-acetyl)₂-(γ-Glu)-(10-(4-carboxyphenoxy)decanoyl))AQ-Aib-EFI-(D-Glu)-αMeY-LIK((2-[2-(2-Amino-ethoxy)-ethoxy]-acetyl)₂-(γ-Glu)-(10-(4-carboxyphenoxy)decanoyl))GGPSSGAPPPS-NH₂ | 254 | 5625.25 |
| 245 | Y-Aib-EGT-αMeF(2F)-TSD-4Pal-Aib-I-αMeL-LD-Orn-K((2-[2-(2-Amino-ethoxy)-ethoxy]-acetyl)₂-(γ-Glu)-(10-(4-carboxyphenoxy)decanoyl))AQ-Aib-EFI-(D-Glu)-αMeY-LIEGGPSSGAPPPSK((2-[2-(2-Amino-ethoxy)-ethoxy]-acetyl)₂-(γ-Glu)-(10-(4-carboxyphenoxy)decanoyl))-NH₂ | 255 | 5754.37 |
| 246 | Y-Aib-EGT-αMeF(2F)-TSD-4Pal-Aib-I-αMeL-LD-Orn-IAQ-Aib-EFIK((2-[2-(2-Amino-ethoxy)-ethoxy]-acetyl)₂-(γ-Glu)-(10-(4-carboxyphenoxy)decanoyl))-αMeY-LIK((2-[2-(2-Amino-ethoxy)-ethoxy]-acetyl)₂-(γ-Glu)-(10-(4-carboxyphenoxy)decanoyl))GGPSSGAPPPS-NH₂ | 256 | 5609.3 |
| 247 | Y-Aib-EGT-αMeF(2F)-TSD-4Pal-Aib-I-αMeL-LD-Orn-IAQ-Aib-K((2-[2-(2-Amino-ethoxy)-ethoxy]-acetyl)₂-(γ-Glu)-(10-(4-carboxyphenoxy)decanoyl))FI-(D-Glu)-αMeY-LIK((2-[2-(2-Amino-ethoxy)-ethoxy]-acetyl)₂-(γ-Glu)-(10-(4-carboxyphenoxy)decanoyl))GGPSSGAPPPS-NH₂ | 257 | 5609.3 |
| 248 | Y-Aib-EGT-αMeF(2F)-TSD-4Pal-Aib-I-αMeL-LD-Orn-IAQ-Aib-K((2-[2-(2-Amino-ethoxy)-ethoxy]-acetyl)₂-(γ-Glu)-(10-(4-carboxyphenoxy)decanoyl))FI-(D-Glu)-αMeY-LIEGGPSSGAPPPSK((2-[2-(2-Amino-ethoxy)-ethoxy]-acetyl)₂-(γ-Glu)-(10-(4-carboxyphenoxy)decanoyl))-NH₂ | 258 | 5738.41 |
| 249 | Y-Aib-EGT-αMeF(2F)-TSD-2Nal-SI-αMeL-LD-Orn-K((2-[2-(2-Amino-ethoxy)-ethoxy]-acetyl)₂-(γ-Glu)-CO-(CH₂)₁₂-CO₂H)AQ-Aib-K((2-[2-(2-Amino-ethoxy)-ethoxy]-acetyl)₂-(γ-Glu)-CO-(CH₂)₁₂-CO₂H)FI-(D-Glu)-αMeY-LIEGGPSSGAPPPS-NH₂ | 259 | 5576.27 |
| 250 | Y-Aib-EGT-αMeF(2F)-TSD-2Nal-SI-αMeL-LD-Orn-K((2-[2-(2-Amino-ethoxy)-ethoxy]-acetyl)₂-(γ-Glu)-CO-(CH₂)₁₂-CO₂H)AQ-Aib-EFI-(D-Glu)-αMeY-LIK((2-[2-(2-Amino-ethoxy)-ethoxy]-acetyl)₂-(γ-Glu)-CO-(CH₂)₁₂-CO₂H)GGPSSGAPPPS-NH₂ | 260 | 5576.27 |
| 251 | Y-Aib-EGT-αMeF(2F)-TSD-2Nal-SI-αMeL-LD-Orn-K((2-[2-(2-Amino-ethoxy)-ethoxy]-acetyl)₂-(γ-Glu)-CO-(CH₂)₁₂-CO₂H)AQ-Aib-EFI-(D-Glu)-αMeY-LIEGGPSSGAPPPSK((2-[2-(2-Amino-ethoxy)-ethoxyl-acetyl)₂-(γ-Glu)-CO-(CH₂)₁₂-CO₂H)-NH₂ | 261 | 5705.38 |
| 252 | Y-Aib-EGT-αMeF(2F)-TSD-2Nal-SI-αMeL-LD-Orn-IAQ-Aib-EFIK((2-[2-(2-Amino-ethoxy)-ethoxy]-acetyl)₂-(γ-Glu)-CO-(CH₂)₁₂-CO₂H)-αMeY-LIK((2-[2-(2-Amino-ethoxy)-ethoxy]-acetyl)₂-(γ-Glu)-CO-(CH₂)₁₂-CO₂H)GGPSSGAPPPS-NH₂ | 262 | 5560.31 |
| 253 | Y-Aib-EGT-αMeF(2F)-TSD-2Nal-SI-αMeL-LD-Orn-IAQ-Aib-K((2-[2-(2-Amino-ethoxy)-ethoxy]-acetyl)₂-(γ-Glu)-CO-(CH₂)₁₂-CO₂H)Fl-(D-Glu)-αMeY-LIK((2-[2-(2-Amino-ethoxy)-ethoxy]-acetyl)₂-(γ-Glu)-CO-(CH₂)₁₂-CO₂H)GGPSSGAPPPS-NH₂ | 263 | 5560.31 |
| 254 | Y-Aib-EGT-αMeF(2F)-TSD-2Nal-SI-αMeL-LD-Orn-IAQ-Aib-K((2-[2-(2-Amino-ethoxy)-ethoxy]-acetyl)₂-(γ-Glu)-CO-(CH₂)₁₂-CO₂H)FI-(D-Glu)-αMeY-LIEGGPSSGAPPPSK((2-[2-(2-Amino-ethoxy)-ethoxyl-acetyl)₂-(γ-Glu)-CO-(CH₂)₁₂-CO₂H)-NH₂ | 264 | 5689.42 |
| 255 | Y-Aib-EGT-αMeF(2F)-TSD-2Nal-SI-αMeL-LD-Orn-K((2-[2-(2-Amino-ethoxy)-ethoxy]-acetyl)₂-CO-(CH₂)₁₂-CO₂H)AQ-Aib-K((2-[2-(2-Amino-ethoxy)-ethoxy]-acetyl)₂-CO-(CH₂)₁₂-CO₂H)FI-(D-Glu)-αMeY-LIEGGPSSGAPPPS-NH₂ | 265 | 5318.04 |
| 256 | Y-Aib-EGT-αMeF(2F)-TSD-2Nal-SI-αMeL-LD-Orn-K((2-[2-(2-Amino-ethoxy)-ethoxy]-acetyl)₂-CO-(CH₂)₁₂-CO₂H)AQ-Aib-EFI-(D-Glu)-αMeY-LIK((2-[2-(2-Amino-ethoxy)-ethoxy]-acetyl)₂-CO-(CH₂)₁₂-CO₂H)GGPSSGAPPPS-NH₂ | 266 | 5318.04 |
| 257 | Y-Aib-EGT-αMeF(2F)-TSD-2Nal-SI-αMeL-LD-Orn-K((2-[2-(2-Amino-ethoxy)-ethoxy]-acetyl)₂-CO-(CH₂)₁₂-CO₂H)AQ-Aib-EFI-(D-Glu)-αMeY-LIEGGPSSGAPPPSK((2-[2-(2-Amino-ethoxy)-ethoxy]-acetyl)₂-CO-(CH₂)₁₂-CO₂H)-NH₂ | 267 | 5302.08 |
| 258 | Y-Aib-EGT-αMeF(2F)-TSD-2Nal-SI-αMeL-LD-Orn-IAQ-Aib-K((2-[2-(2-Amino-ethoxy)-ethoxy]-acetyl)₂-CO-(CH₂)₁₂-CO₂H)Fl-(D-Glu)-αMeY-LIEGGPSSGAPPPSK((2-[2-(2-Amino-ethoxy)-ethoxy]-acetyl)₂-CO-(CH₂)₁₂-CO₂H)-NH₂ | 268 | 5431.2 |
| 259 | Y-Aib-EGT-αMeF(2F)-TSD-OMeY-SI-αMeL-LD-Orn-K((2-[2-(2-Amino-ethoxy)-ethoxy]-acetyl)₂-(γ-Glu)-CO-(CH₂)₁₂-CO₂H)AQ-Aib-K((2-[2-(2-Amino-ethoxy)-ethoxy]-acetyl)₂-(γ-Glu)-CO-(CH₂)₁₂-CO₂H)FI-(D-Glu)-αMeY-LIEGGPSSGAPPPS-NH₂ | 269 | 5556.23 |
| 260 | Y-Aib-EGT-αMeF(2F)-TSD-OMeY-SI-αMeL-LD-Orn-K((2-[2-(2-Amino-ethoxy)-ethoxy]-acetyl)₂-(γ-Glu)-CO-(CH₂)₁₂-CO₂H)AQ-Aib-EFI-(D-Glu)-αMeY-LIK((2-[2-(2-Amino-ethoxy)-ethoxy]-acetyl)₂-(γ-Glu)-CO-(CH₂)₁₂-CO₂H)GGPSSGAPPPS-NH₂ | 270 | 5556.23 |
| 261 | Y-Aib-EGT-αMeF(2F)-TSD-OMeY-SI-αMeL-LD-Orn-K((2-[2-(2-Amino-ethoxy)-ethoxy]-acetyl)₂-(γ-Glu)-CO-(CH₂)₁₂-CO₂H)AQ-Aib-EFI-(D-Glu)-αMeY-LIEGGPSSGAPPPSK((2-[2-(2-Amino-ethoxy)-ethoxy]-acetyl)₂-(γ-Glu)-CO-(CH₂)₁₂-CO₂H)-NH₂ | 271 | 5685.35 |
| 262 | Y-Aib-EGT-αMeF(2F)-TSD-OMeY-SI-αMeL-LD-Orn-IAQ-Aib-EFIK((2-[2-(2-Amino-ethoxy)-ethoxy]-acetyl)₂-(γ-Glu)-CO-(CH₂)₁₂-CO₂H)-αMeY-LIK((2-[2-(2-Amino-ethoxy)-ethoxy]-acetyl)₂-(γ-Glu)-CO-(CH₂)₁₂-CO₂H)GGPSSGAPPPS-NH₂ | 272 | 5540.28 |
| 263 | Y-Aib-EGT-αMeF(2F)-TSD-OMeY-SI-αMeL-LD-Orn-IAQ-Aib-K((2-[2-(2-Amino-ethoxy)-ethoxy]-acetyl)₂-(γ-Glu)-CO-(CH₂)₁₂-CO₂H)FI-(D-Glu)-αMeY-LIK((2-[2-(2-Amino-ethoxy)-ethoxy]-acetyl)₂-(γ-Glu)-CO-(CH₂)₁₂-CO₂H)GGPSSGAPPPS-NH₂ | 273 | 5540.28 |
| 264 | Y-Aib-EGT-αMeF(2F)-TSD-OMeY-SI-αMeL-LD-Orn-IAQ-Aib-K((2-[2-(2-Amino-ethoxy)-ethoxy]-acetyl)₂-(γ-Glu)-CO-(CH₂)₁₂-CO₂H)FI-(D-Glu)-αMeY-LIEGGPSSGAPPPSK((2-[2-(2-Amino-ethoxy)-ethoxyl-acetyl)₂-(γ-Glu)-CO-(CH₂)₁₂-CO₂H)-NH₂ | 274 | 5669.39 |
| 265 | Y-Aib-EGT-αMeF(2F)-TSD-OMeY-SI-αMeL-LD-Orn-K((2-[2-(2-Amino-ethoxy)-ethoxy]-acetyl)₂-CO-(CH₂)₁₂-CO₂H)AQ-Aib-K((2-[2-(2-Amino-ethoxy)-ethoxy]-acetyl)₂-CO-(CH₂)₁₂-CO₂H)FI-(D-Glu)-αMeY-LIEGGPSSGAPPPS-NH₂ | 275 | 5298.01 |
| 266 | Y-Aib-EGT-αMeF(2F)-TSD-OMeY-SI-αMeL-LD-Orn-K((2-[2-(2-Amino-ethoxy)-ethoxy]-acetyl)₂-CO-(CH₂)₁₂-CO₂H)AQ-Aib-EFI-(D-Glu)-αMeY-LIK((2-[2-(2-Amino-ethoxy)-ethoxy]-acetyl)₂-CO-(CH₂)₁₂-CO₂H)GGPSSGAPPPS-NH₂ | 276 | 5298.01 |
| 267 | Y-Aib-EGT-αMeF(2F)-TSD-OMeY-SI-αMeL-LD-Orn-K((2-[2-(2-Amino-ethoxy)-ethoxy]-acetyl)₂-CO-(CH₂)₁₂-CO₂H)AQ-Aib-EFI-(D-Glu)-αMeY-LIEGGPSSGAPPPSK((2-[2-(2-Amino-ethoxy)-ethoxy]-acetyl)₂-CO-(CH₂)₁₂-CO₂H)-NH₂ | 277 | 5427.12 |
| 268 | Y-Aib-EGT-αMeF(2F)-TSD-OMeY-SI-αMeL-LD-Orn-IAQ-Aib-K((2-[2-(2-Amino-ethoxy)-ethoxy]-acetyl)₂-CO-(CH₂)₁₂-CO₂H)FI-(D-Glu)-αMeY-LIEGGPSSGAPPPSK((2-[2-(2-Amino-ethoxy)-ethoxy]-acetyl)₂-CO-(CH₂)₁₂-CO₂H)-NH₂ | 278 | 5411.16 |
| 269 | Y-Aib-EGT-αMeF(2F)-TSD-Nle-SI-αMeL-LD-Orn-IAQ-Aib-EFIK((2-[2-(2-Amino-ethoxy)-ethoxy]-acetyl)₂-(γ-Glu)-CO-(CH₂)₁₂-CO₂H)-αMeY-LIK((2-[2-(2-Amino-ethoxy)-ethoxy]-acetyl)₂-(γ-Glu)-CO-(CH₂)₁₂-CO₂H)GGPSSGAPPPS-NH₂ | 279 | 5476.23 |
| 270 | Y-Aib-EGT-αMeF(2F)-TSD-hTyr-SI-αMeL-LD-Orn-IAQ-Aib-EFIK((2-[2-(2-Amino-ethoxy)-ethoxy]-acetyl)₂-(γ-Glu)-CO-(CH₂)₁₂-CO₂H)-αMeY-LIK((2-[2-(2-Amino-ethoxy)-ethoxy]-acetyl)₂-(γ-Glu)-CO-(CH₂)₁₂-CO₂H)GGPSSGAPPPS-NH₂ | 280 | 5540.28 |
| 271 | Y-Aib-EGT-αMeF(2F)-TSD-Nle-SI-αMeL-LD-Orn-K((2-[2-(2-Amino-ethoxy)-ethoxy]-acetyl)₂-CO-(CH₂)₁₂-CO₂H)AQ-Aib-K((2-[2-(2-Amino-ethoxy)-ethoxy]-acetyl)₂-CO-(CH₂)₁₂-CO₂H)FI-(D-Glu)-αMeY-LIEGGPSSGAPPPS-NH₂ | 281 | 5233.96 |
| 272 | Y-Aib-EGT-αMeF(2F)-TSD-hTyr-SI-αMeL-LD-Orn-K((2-[2-(2-Amino-ethoxy)-ethoxy]-acetyl)₂-CO-(CH₂)₁₂-CO₂H)AQ-Aib-K((2-[2-(2-Amino-ethoxy)-ethoxy]-acetyl)₂-CO-(CH₂)₁₂-CO₂H)FI-(D-Glu)-αMeY-LIEGGPSSGAPPPS-NH₂ | 282 | 5298.01 |
| 273 | Y-Aib-EGT-αMeF(2F)-TSD-4Pal-SI-αMeL-LD-Orn-K((2-[2-(2-Amino-ethoxy)-ethoxy]-acetyl)₂-(γ-Glu)-(10-(4-carboxyphenoxy)decanoyl))AQ-Aib-EFI-(D-Glu)-αMeY-LIEGGPSSGAPPPSK((2-[2-(2-Amino-ethoxy)-ethoxy]-acetyl)₂-(γ-Glu)-(10-(4-carboxyphenoxy)decanoyl))-NH₂ | 283 | 5756.34 |
| 274 | Y-Aib-EGT-αMeF(2F)-TSD-4Pa1-SI-αMeL-LD-Orn-IAQ-Aib-EFIK((2-[2-(2-Amino-ethoxy)-ethoxy]-acetyl)₂-(γ-Glu)-(10-(4-carboxyphenoxy)decanoyl))-αMeY-LIK((2-[2-(2-Amino-ethoxy)-ethoxy]-acetyl)₂-(γ-Glu)-(10-(4-carboxyphenoxy)decanoyl))GGPSSGAPPPS-NH₂ | 284 | 5611.27 |
| 275 | Y-Aib-EGT-αMeF(2F)-TSD-4Pa1-SI-αMeL-LD-Orn-IAQ-Aib-K((2-[2-(2-Amino-ethoxy)-ethoxy]-acetyl)₂-(γ-Glu)-(10-(4-carboxyphenoxy)decanoyl))FI-(D-Glu)-αMeY-LIK((2-[2-(2-Amino-ethoxy)-ethoxy]-acetyl)₂-(γ-Glu)-(10-(4-carboxyphenoxy)decanoyl))GGPSSGAPPPS-NH₂ | 285 | 5611.27 |
| 276 | Y-Aib-EGT-αMeF(2F)-TSD-4Pal-SI-αMeL-LD-Orn-IAQ-Aib-K((2-[2-(2-Amino-ethoxy)-ethoxy]-acetyl)₂-(y-Glu)-(10-(4-carboxyphenoxy)decanoyl))FI-(D-Glu)-αMeY-LIEGGPSSGAPPPSK((2-[2-(2-Amino-ethoxy)-ethoxy]-acetyl)₂-(γ-Glu)-(10-(4-carboxyphenoxy)decanoyl))-NH₂ | 286 | 5740.38 |
| 277 | Y-Aib-EGT-αMeF(2F)-TSD-OMeY-SI-αMeL-LD-Orn-K((2-[2-(2-Amino-ethoxy)-ethoxy]-acetyl)₂-(γ-Glu)-(10-(4-carboxyphenoxy)decanoyl))AQ-Aib-K((2-[2-(2-Amino-ethoxy)-ethoxy]-acetyl)₂-(γ-Glu)-(10-(4-carboxyphenoxy)decanoyl))FI-(D-Glu)-αMeY-LIEGGPSSGAPPPS-NH₂ | 287 | 5656.26 |
| 278 | Y-Aib-EGT-αMeF(2F)-TSD-OMeY-SI-αMeL-LD-Orn-K((2-[2-(2-Amino-ethoxy)-ethoxy]-acetyl)₂-(γ-Glu)-(10-(4-carboxyphenoxy)decanoyl))AQ-Aib-EFI-(D-Glu)-αMeY-LIK((2-[2-(2-Amino-ethoxy)-ethoxy]-acetyl)₂-(γ-Glu)-(10-(4-carboxyphenoxy)decanoyl))GGPSSGAPPPS-NH₂ | 288 | 5656.26 |
| 279 | Y-Aib-EGT-αMeF(2F)-TSD-OMeY-SI-αMeL-LD-Orn-IAQ-Aib-EFIK((2-[2-(2-Amino-ethoxy)-ethoxy]-acetyl)₂-(γ-Glu)-(10-(4-carboxyphenoxy)decanoyl))-αMeY-LIK((2-[2-(2-Amino-ethoxy)-ethoxy]-acetyl)₂-(γ-Glu)-(10-(4-carboxyphenoxy)decanoyl))GGPSSGAPPPS-NH₂ | 289 | 5640.31 |
| 280 | Y-Aib-EGT-αMeF(2F)-TSD-OMeY-SI-αMeL-LD-Orn-IAQ-Aib-K((2-[2-(2-Amino-ethoxy)-ethoxy]-acetyl)₂-(γ-Glu)-(10-(4-carboxyphenoxy)decanoyl))FI-(D-Glu)-αMeY-LIK((2-[2-(2-Amino-ethoxy)-ethoxy]-acetyl)₂-(γ-Glu)-(10-(4-carboxyphenoxy)decanoyl))GGPSSGAPPPS-NH₂ | 290 | 5640.31 |
| 281 | Y-Aib-EGT-αMeF(2F)-TSD-2Nal-SI-αMeL-LD-Orn-K((2-[2-(2-Amino-ethoxy)-ethoxy]-acetyl)₂-(γ-Glu)-(10-(4-carboxyphenoxy)decanoyl))AQ-Aib-K((2-[2-(2-Amino-ethoxy)-ethoxy]-acetyl)₂-(γ-Glu)-(10-(4-carboxyphenoxy)decanoyl))FI-(D-Glu)-αMeY-LIEGGPSSGAPPPS-NH₂ | 291 | 5676.3 |
| 282 | Y-Aib-EGT-αMeF(2F)-TSD-2Nal-SI-αMeL-LD-Orn-K((2-[2-(2-Amino-ethoxy)-ethoxy]-acetyl)₂-(γ-Glu)-(10-(4-carboxyphenoxy)decanoyl))AQ-Aib-EFI-(D-Glu)-αMeY-LIK((2-[2-(2-Amino-ethoxy)-ethoxy]-acetyl)₂-(γ-Glu)-(10-(4-carboxyphenoxy)decanoyl))GGPSSGAPPPS-NH₂ | 292 | 5676.3 |
| 283 | Y-Aib-EGT-αMeF(2F)-TSD-2Nal-SI-αMeL-LD-Orn-IAQ-Aib-EFIK((2-[2-(2-Amino-ethoxy)-ethoxy]-acetyl)₂-(γ-Glu)-(10-(4-carboxyphenoxy)decanoyl))-αMeY-LIK((2-[2-(2-Amino-ethoxy)-ethoxy]-acetyl)₂-(γ-Glu)-(10-(4-carboxyphenoxy)decanoyl))GGPSSGAPPPS-NH₂ | 293 | 5660.34 |
| 284 | Y-Aib-EGT-αMeF(2F)-TSD-2Nal-SI-αMeL-LD-Orn-IAQ-Aib-K((2-[2-(2-Amino-ethoxy)-ethoxy]-acetyl)₂-(γ-Glu)-(10-(4-carboxyphenoxy)decanoyl))FI-(D-Glu)-αMeY-LIK((2-[2-(2-Amino-ethoxy)-ethoxy]-acetyl)₂-(γ-Glu)-(10-(4-carboxyphenoxy)decanoyl))GGPSSGAPPPS-NH₂ | 294 | 5660.34 |
| 285 | Y-Aib-EGT-αMeF(2F)-TSD-4Pal-SI-αMeL-LD-Orn-K((2-[2-(2-Amino-ethoxy)-ethoxy]-acetyl)₂-(γ-Glu)-(11-(4-carboxyphenoxy)undecanoyl))AQ-Aib-EFI-(D-Glu)-αMeY-LIEGGPSSGAPPPSK((2-[2-(2-Amino-ethoxy)-ethoxy]-acetyl)₂-(γ-Glu)-(11-(4-carboxyphenoxy)undecanoyl))-NH2 | 295 | 5784.39 |
| 286 | Y-Aib-EGT-αMeF(2F)-TSD-4Pal-SI-αMeL-LD-Orn-IAQ-Aib-EFIK((2-[2-(2-Amino-ethoxy)-ethoxy]-acetyl)₂-(γ-Glu)-(11-(4-carboxyphenoxy)undecanoyl)-αMeY-LIK((2-[2-(2-Amino-ethoxy)-ethoxy]-acetyl)₂-(γ-Glu)-(11-(4-carboxyphenoxy)undecanoyl)GGPSSGAPPPS-NH₂ | 296 | 5639.32 |
| 287 | Y-Aib-EGT-αMeF(2F)-TSD-4Pal-SI-αMeL-LD-Orn-IAQ-Aib-K((2-[2-(2-Amino-ethoxy)-ethoxy]-acetyl)₂-(γ-Glu)-(11-(4-carboxyphenoxy)undecanoyl)FI-(D-Glu)-αMeY-LIK((2-[2-(2-Amino-ethoxy)-ethoxy]-acetyl)₂-(γ-Glu)-(11-(4-carboxyphenoxy)undecanoyl)GGPSSGAPPPS-NH₂ | 297 | 5639.32 |
| 288 | Y-Aib-EGT-αMeF(2F)-TSD-4Pal-SI-αMeL-LD-Orn-IAQ-Aib-K((2-[2-(2-Amino-ethoxy)-ethoxy]-acetyl)₂-(γ-Glu)-(11-(4-carboxyphenoxy)undecanoyl)FI-(D-Glu)-αMeY-LIEGGPSSGAPPPSK((2-[2-(2-Amino-ethoxy)-ethoxy]-acetyl)₂-(γ-Glu)-(11-(4-carboxyphenoxy)undecanoyl)-NH₂ | 298 | 5768.44 |
| 289 | Y-Aib-EGT-αMeF(2F)-TSD-OMeY-SI-αMeL-LD-Orn-K((2-[2-(2-Amino-ethoxy)-ethoxy]-acetyl)₂-(γ-Glu)-CO-(CH₂)₁₀-CH₃)AQ-Aib-K((2-[2-(2-Amino-ethoxy)-ethoxy]-acetyl)₂-(γ-Glu)-CO-(CH₂)₁₀-CH₃)FI-(D-Glu)-αMeY-LIEGGPSSGAPPPS-NH₂ | 299 | 5440.16 |
| 290 | Y-Aib-EGT-αMeF(2F)-TSD-OMeY-SI-αMeL-LD-Orn-K((2-[2-(2-Amino-ethoxy)-ethoxy]-acetyl)₂-(γ-Glu)-CO-(CH₂)₁₀-CH₃)AQ-Aib-EFI-(D-Glu)-αMeY-LIK((2-[2-(2-Amino-ethoxy)-ethoxy]-acetyl)₂-(γ-Glu)-CO-(CH₂)₁₀-CH₃)GGPSSGAPPPS-NH₂ | 300 | 5440.16 |
| 291 | Y-Aib-EGT-αMeF(2F)-TSD-OMeY-SI-αMeL-LD-Orn-K((2-[2-(2-Amino-ethoxy)-ethoxy]-acetyl)₂-(γ-Glu)-CO-(CH₂)₁₀-CH₃)AQ-Aib-EFI-(D-Glu)-αMeY-LIEGGPSSGAPPPSK((2-[2-(2-Amino-ethoxy)-ethoxy]-acetyl)₂-(γ-Glu)-CO-(CH₂)₁₀-CH₃)-NH₂ | 301 | 5569.27 |
| 292 | Y-Aib-EGT-αMeF(2F)-TSDK((2-[2-(2-Amino-ethoxy)-ethoxy]-acetyl)₂-(γ-Glu)-CO-(CH₂)₁₀-CH₃)-Aib-I-αMeL-LD-Orn-K((2-[2-(2-Amino-ethoxy)-ethoxy]-acetyl)₂-(γ-Glu)-CO-(CH₂)₁₀-CH₃)AQ-Aib-EFI-(D-Glu)-αMeY-LIEGGPSSGAPPPS-NH₂ | 302 | 5390.1 |
| 293 | Y-Aib-EGT-αMeF(2F)-TSDK((2-[2-(2-Amino-ethoxy)-ethoxy]-acetyl)₂-(γ-Glu)-CO-(CH₂)₁₀-CH₃)SI-αMeL-LD-Orn-K((2-[2-(2-Amino-ethoxy)-ethoxy]-acetyl)₂-(γ-Glu)-CO-(CH₂)₁₀-CH₃)AQ-Aib-E-αMeF-I-(D-Glu)-αMeY-LIEGGPSSGAPPPS-NH₂ | 303 | 5406.1 |
| 294 | Y-Aib-EGT-αMeF(2F)-TSDK((2-[2-(2-Amino-ethoxy)-ethoxy]-acetyl)₂-(γ-Glu)-CO-(CH₂)₁₀-CH₃)SI-αMeL-LD-Orn-K((2-[2-(2-Amino-ethoxy)-ethoxy]-acetyl)₂-(γ-Glu)-CO-(CH₂)₁₀-CH₃)AQ-Aib-EFI-(D-Glu)-αMeY-LIEGG-NH₂ | 304 | 4614.25 |
| 295 | Y-Aib-EGT-αMeF(2F)-TSD-4Pal-SI-αMeL-LD-Orn-K((2-[2-(2-Amino-ethoxy)-ethoxy]-acetyl)₂-(γ-Glu)-CO-(CH₂)₁₀-CH₃)AQ-Aib-K((2-[2-(2-Amino-ethoxy)-ethoxy]-acetyl)₂-(γ-Glu)-CO-(CH₂)₁₀-CH₃)FI-(D-Glu)-αMeY-LIEGG-NH₂ | 305 | 4633.3 |
| 296 | Y-Aib-EGT-αMeF(2F)-TSD-4Pal-SI-αMeL-LD-Orn-K((2-[2-(2-Amino-ethoxy)-ethoxy]-acetyl)₂-(γ-Glu)-CO-(CH₂)₁₀-CH₃)AQ-Aib-EFI-(D-Glu)-αMeY-LIK((2-[2-(2-Amino-ethoxy)-ethoxy]-acetyl)₂-(γ-Glu)-CO-(CH₂)₁₀-CH₃)GG-NH₂ | 306 | 4633.3 |
| 297 | Y-Aib-EGT-αMeF(2F)-TSDK((2-[2-(2-Amino-ethoxy)-ethoxy]-acetyl)₂-(γ-Glu)-CO-(CH₂)₁₀-CH₃)SI-αMeL-LD-Orn-K((2-[2-(2-Amino-ethoxy)-ethoxy]-acetyl)₂-(γ-Glu)-CO-(CH₂)₁₀-CH₃)AQ-Aib-E-αMeF-I-(D-Glu)-αMeY-LIEGG-NH₂ | 307 | 4628.28 |
| 298 | Y-Aib-EGT-αMeF(2F)-TSD-4Pal-SI-αMeL-LD-Orn-K((2-[2-(2-Amino-ethoxy)-ethoxy]-acetyl)₂-(γ-Glu)-CO-(CH₂)₁₀-CH₃)AQ-Aib-K((2-[2-(2-Amino-ethoxy)-ethoxy]-acetyl)₂-(γ-Glu)-CO-(CH₂)₁₀-CH₃)FI-(D-Glu)-αMeY-LI-Orn-GGPSSGAPPPS-NH₂ | 308 | 5396.15 |
| 299 | Y-Aib-EGT-αMeF(2F)-TSD-4Pal-SI-αMeL-LD-Orn-K((2-[2-(2-Amino-ethoxy)-ethoxy]-acetyl)₂-(γ-Glu)-CO-(CH₂)₁₀-CH₃)AQ-Aib-Orn-FI-(D-Glu)-αMeY-LIK((2-[2-(2-Amino-ethoxy)-ethoxy]-acetyl)₂-(γ-Glu)-CO-(CH₂)₁₀-CH₃)GGPSSGAPPPS-NH₂ | 309 | 5396.15 |
| 300 | Y-Aib-EGT-αMeF(2F)-TSDY-Aib-I-αMeL-LD-Orn-K((2-[2-(2-Amino-ethoxy)-ethoxy]-acetyl)₂-(γ-Glu)-CO-(CH₂)₁₀-CH₃)AQ-Aib-K((2-[2-(2-Amino-ethoxy)-ethoxy]-acetyl)₂-(γ-Glu)-CO-(CH₂)₁₀-CH₃)FI-(D-Glu)-αMeY-LIEGGPSSGAPPPS-NH₂ | 310 | 5424.16 |
| 301 | Y-Aib-EGT-αMeF(2F)-TSDY-Aib-I-αMeL-LD-Orn-K((2-[2-(2-Amino-ethoxy)-ethoxy]-acetyl)₂-(γ-Glu)-CO-(CH₂)₁₀-CH₃)AQ-Aib-EFI-(D-Glu)-αMeY-LIK((2-[2-(2-Amino-ethoxy)-ethoxy]-acetyl)₂-(γ-Glu)-CO-(CH₂)₁₀-CH₃)GGPSSGAPPPS-NH₂ | 311 | 5424.16 |
| 302 | Y-Aib-EGT-αMeF(2F)-TSDY-Aib-I-αMeL-LD-Orn-K((2-[2-(2-Amino-ethoxy)-ethoxy]-acetyl)₂-(γ-Glu)-CO-(CH₂)₁₀-CH₃)AQ-Aib-EFI-(D-Glu)-αMeY-LIEGGPSSGAPPPSK((2-[2-(2-Amino-ethoxy)-ethoxy]-acetyl)₂-(γ-Glu)-CO-(CH₂)₁₀-CH₃)-NH₂ | 312 | 5553.28 |
| 303 | Y-Aib-EGT-αMeF(2F)-TSDY-αMeS-I-αMeL-LD-Orn-IAQ-Aib-EFIK((2-[2-(2-Amino-ethoxy)-ethoxy]-acetyl)₂-(γ-Glu)-CO-(CH₂)₁₂-CO₂H)-αMeY-LIK((2-[2-(2-Amino-ethoxy)-ethoxy]-acetyl)₂-(γ-Glu)-CO-(CH₂)₁₂-CO₂H)GGPSSGAPPPS-NH₂ | 313 | 5540.28 |
| 304 | Y-Aib-EGT-αMeF(2F)-TSDV-Aib-I-αMeL-LD-Orn-IAQ-Aib-EFIK((2-[2-(2-Amino-ethoxy)-ethoxy]-acetyl)₂-(γ-Glu)-CO-(CH₂)₁₂-CO₂H)-αMeY-LIK((2-[2-(2-Amino-ethoxy)-ethoxy]-acetyl)₂-(γ-Glu)-CO-(CH₂)₁₂-CO₂H)GGPSSGAPPPS-NH₂ | 314 | 5460.24 |
| 305 | Y-Aib-EGT-αMeF(2F)-TSDV-αMeS-I-αMeL-LD-Orn-IAQ-Aib-EFIK((2-[2-(2-Amino-ethoxy)-ethoxy]-acetyl)₂-(γ-Glu)-CO-(CH₂)₁₂-CO₂H)-αMeY-LIK((2-[2-(2-Amino-ethoxy)-ethoxy]-acetyl)₂-(γ-Glu)-CO-(CH₂)₁₂-CO₂H)GGPSSGAPPPS-NH₂ | 315 | 5476.23 |
| 306 | Y-Aib-EGT-αMeF(2F)-TSD-4Pal-αMeS-I-αMeL-LD-Orn-IAQ-Aib-EFIK((2-[2-(2-Amino-ethoxy)-ethoxy]-acetyl)₂-(γ-Glu)-(10-(4-carboxyphenoxy)decanoyl))-αMeY-LIK((2-[2-(2-Amino-ethoxy)-ethoxy]-acetyl)₂-(γ-Glu)-(10-(4-carboxyphenoxy)decanoyl))GGPSSGAPPPS-NH₂ | 316 | 5625.3 |
| 307 | Y-Aib-EGT-αMeF(2F)-TSDY-αMeS-I-αMeL-LD-Orn-IAQ-Aib-EFIK((2-[2-(2-Amino-ethoxy)-ethoxy]-acetyl)₂-(γ-Glu)-(10-(4-carboxyphenoxy)decanoyl))-αMeY-LIK((2-[2-(2-Amino-ethoxy)-ethoxy]-acetyl)₂-(γ-Glu)-(10-(4-carboxyphenoxy)decanoyl))GGPSSGAPPPS-NH₂ | 317 | 5640.31 |
| 308 | Y-Aib-EGT-αMeF(2F)-TSDV-Aib-I-αMeL-LD-Orn-IAQ-Aib-EFIK((2-[2-(2-Amino-ethoxy)-ethoxy]-acetyl)₂-(γ-Glu)-(10-(4-carboxyphenoxy)decanoyl))-αMeY-LIK((2-[2-(2-Amino-ethoxy)-ethoxy]-acetyl)₂-(γ-Glu)-(10-(4-carboxyphenoxy)decanoyl))GGPSSGAPPPS-NH₂ | 318 | 5560.27 |
| 309 | Y-Aib-EGT-αMeF(2F)-TSDV-αMeS-I-αMeL-LD-Orn-IAQ-Aib-EFIK((2-[2-(2-Amino-ethoxy)-ethoxy]-acetyl)₂-(γ-Glu)-(10-(4-carboxyphenoxy)decanoyl))-αMeY-LIK((2-[2-(2-Amino-ethoxy)-ethoxy]-acetyl)₂-(γ-Glu)-(10-(4-carboxyphenoxy)decanoyl))GGPSSGAPPPS-NH₂ | 319 | 5576.27 |
| 310 | Y-Aib-EGT-αMeF(2F)-TSD-hTyr-SI-αMeL-LD-Orn-IAQ-Aib-EFIK((2-[2-(2-Amino-ethoxy)-ethoxy]-acetyl)₂-(γ-Glu)-(10-(4-carboxyphenoxy)decanoyl))-αMeY-LIK((2-[2-(2-Amino-ethoxy)-ethoxy]-acetyl)₂-(γ-Glu)-(10-(4-carboxyphenoxy)decanoyl))GGPSSGAPPPS-NH₂ | 320 | 5640.31 |
| 311 | Y-Aib-EGT-αMeF(2F)-TSD-4Pal-Aib-I-αMeL-LD-Orn-IAQ-Aib-EFIK((2-[2-(2-Amino-ethoxy)-ethoxy]-acetyl)₂-(γ-Glu)-(11-(4-carboxyphenoxy)undecanoyl)-αMeY-LIK((2-[2-(2-Amino-ethoxy)-ethoxy]-acetyl)₂-(γ-Glu)-(11-(4-carboxyphenoxy)undecanoyl)GGPSSGAPPPS-NH₂ | 321 | 5637.35 |
| 312 | Y-Aib-EGT-αMeF(2F)-TSDY-Aib-I-αMeL-LD-Orn-IAQ-Aib-EFIK((2-[2-(2-Amino-ethoxy)-ethoxy]-acetyl)₂-(γ-Glu)-(11-(4-carboxyphenoxy)undecanoyl)-αMeY-LIK((2-[2-(2-Amino-ethoxy)-ethoxy]-acetyl)₂-(γ-Glu)-(11-(4-carboxyphenoxy)undecanoyl)GGPSSGAPPPS-NH₂ | 322 | 5652.36 |
| 313 | Y-Aib-EGT-αMeF(2F)-TSDV-Aib-I-αMeL-LD-Orn-IAQ-Aib-EFIK((2-[2-(2-Amino-ethoxy)-ethoxy]-acetyl)₂-(γ-Glu)-(11-(4-carboxyphenoxy)undecanoyl)-αMeY-LIK((2-[2-(2-Amino-ethoxy)-ethoxy]-acetyl)₂-(γ-Glu)-(11-(4-carboxyphenoxy)undecanoyl)GGPSSGAPPPS-NH₂ | 323 | 5588.32 |
| 314 | Y-Aib-EGT-αMeF(2F)-TSD-Nle-SI-αMeL-LD-Orn-IAQ-Aib-EFIK((2-[2-(2-Amino-ethoxy)-ethoxy]-acetyl)₂-(γ-Glu)-(10-(4-carboxyphenoxy)decanoyl))-αMeY-LIK((2-[2-(2-Amino-ethoxy)-ethoxy]-acetyl)₂-(γ-Glu)-(10-(4-carboxyphenoxy)decanoyl))GGPSSGAPPPS-NH₂ | 324 | 5576.27 |
| 315 | Y-Aib-EGT-αMeF(2F)-TSD-4Pal-Aib-I-αMeL-LD-Orn-IAQ-Aib-Orn-FIK((2-[2-(2-Amino-ethoxy)-ethoxy]-acetyl)₂-(γ-Glu)-CO-(CH₂)₁₂-CO₂H)-αMeY-LIK((2-[2-(2-Amino-ethoxy)-ethoxy]-acetyl)₂-(γ-Glu)-CO-(CH₂)₁₂-CO₂H)GGPSSGAPPPS-NH₂ | 325 | 5494.3 |
| 316 | Y-Aib-EGT-αMeF(2F)-TSDY-Aib-I-αMeL-LD-Orn-IAQ-Aib-Orn-FIK((2-[2-(2-Amino-ethoxy)-ethoxy]-acetyl)₂-(γ-Glu)-CO-(CH₂)₁₂-CO₂H)-αMeY-LIK((2-[2-(2-Amino-ethoxy)-ethoxy]-acetyl)₂-(γ-Glu)-CO-(CH₂)₁₂-CO₂H)GGPSSGAPPPS-NH₂ | 326 | 5509.31 |
| 317 | Y-Aib-EGT-αMeF(2F)-TSDV-Aib-I-αMeL-LD-Orn-IAQ-Aib-Orn-FIK((2-[2-(2-Amino-ethoxy)-ethoxy]-acetyl)₂-(γ-Glu)-CO-(CH₂)₁₂-CO₂H)-αMeY-LIK((2-[2-(2-Amino-ethoxy)-ethoxy]-acetyl)₂-(γ-Glu)-CO-(CH₂)₁₂-CO₂H)GGPSSGAPPPS-NH₂ | 327 | 5445.27 |
| 318 | Y-Aib-EGT-αMeF(2F)-TSDV-Aib-I-αMeL-LD-Orn-K((2-[2-(2-Amino-ethoxy)-ethoxy]-acetyl)₂-(γ-Glu)-CO-(CH₂)₁₂-CO₂H)AQ-Aib-K((2-[2-(2-Amino-ethoxy)-ethoxy]-acetyl)₂-(γ-Glu)-CO-(CH₂)₁₂-CO₂H)FI-(D-Glu)-αMeY-LIEGGPSSGAPPPS-NH₂ | 328 | 5476.19 |
| 319 | Y-Aib-EGT-αMeF(2F)-TSDV-Aib-I-αMeL-LD-Orn-K((2-[2-(2-Amino-ethoxy)-ethoxy]-acetyl)₂-(γ-Glu)-(10-(4-carboxyphenoxy)decanoyl))AQ-Aib-K((2-[2-(2-Amino-ethoxy)-ethoxy]-acetyl)₂-(γ-Glu)-(10-(4-carboxyphenoxy)decanoyl))FI-(D-Glu)-αMeY-LIEGGPSSGAPPPS-NH₂ | 329 | 5576.22 |
| 320 | Y-Aib-EGT-αMeF(2F)-TSD-hTyr-SI-αMeL-LD-Orn-K((2-[2-(2-Amino-ethoxy)-ethoxy]-acetyl)₂-(y-Glu)-(10-(4-carboxyphenoxy)decanoyl))AQ-Aib-K((2-[2-(2-Amino-ethoxy)-ethoxy]-acetyl)₂-(γ-Glu)-(10-(4-carboxyphenoxy)decanoyl))FI-(D-Glu)-αMeY-LIEGGPSSGAPPPS-NH₂ | 330 | 5656.26 |
| 321 | Y-Aib-EGT-αMeF(2F)-TSD-Nle-SI-αMeL-LD-Orn-K((2-[2-(2-Amino-ethoxy)-ethoxy]-acetyl)₂-(γ-Glu)-(10-(4-carboxyphenoxy)decanoyl))AQ-Aib-K((2-[2-(2-Amino-ethoxy)-ethoxy]-acetyl)₂-(γ-Glu)-(10-(4-carboxyphenoxy)decanoyl))FI-(D-Glu)-αMeY-LIEGGPSSGAPPPS-NH₂ | 331 | 5592.22 |
| 322 | Y-Aib-EGT-αMeF(2F)-TSD-4Pal-Aib-I-αMeL-LD-Orn-K((2-[2-(2-Amino-ethoxy)-ethoxy]-acetyl)₂-(γ-Glu)-CO-(CH₂)₁₀-CH₃)AQ-Aib-K((2-[2-(2-Amino-ethoxy)-ethoxy]-acetyl)₂-(γ-Glu)-CO-(CH₂)₁₀-CH₃)FI-(D-Glu)-αMeY-LIEGGPSSGAPPPS-NH2 | 332 | 5409.15 |
| 323 | Y-Aib-EGT-αMeF(2F)-TSD-hTyr-SI-αMeL-LD-Orn-K((2-[2-(2-Amino-ethoxy)-ethoxy]-acetyl)₂-(γ-Glu)-CO-(CH₂)₁₀-CH₃)AQ-Aib-K((2-[2-(2-Amino-ethoxy)-ethoxy]-acetyl)₂-(γ-Glu)-CO-(CH₂)₁₀-CH₃)FI-(D-Glu)-αMeY-LIEGGPSSGAPPPS-NH₂ | 333 | 5440.16 |
| 324 | Y-Aib-EGT-αMeF(2F)-TSD-4Pal-Aib-I-αMeL-LD-Orn-K((2-[2-(2-Amino-ethoxy)-ethoxy]-acetyl)₂-(γ-Glu)-CO-(CH₂)₁₀-CH₃)AQ-Aib-EFI-(D-Glu)-αMeY-LIEGGPSSGAPPPSK((2-[2-(2-Amino-ethoxy)-ethoxy]-acetyl)₂-(γ-Glu)-CO-(CH₂)₁₀-CH₃)-NH₂ | 334 | 5538.26 |
| 325 | Y-Aib-EGT-αMeF(2F)-TSDV-Aib-I-αMeL-LD-Orn-K((2-[2-(2-Amino-ethoxy)-ethoxy]-acetyl)₂-(γ-Glu)-CO-(CH₂)₁₂-CO₂H)AQ-Aib-EFI-(D-Glu)-αMeY-LIK((2-[2-(2-Amino-ethoxy)-ethoxy]-acetyl)₂-(γ-Glu)-CO-(CH₂)₁₂-CO₂H)GGPSSGAPPPS-NH₂ | 335 | 5476.19 |
| 326 | Y-Aib-EGT-αMeF(2F)-TSDV-Aib-I-αMeL-LD-Orn-K((2-[2-(2-Amino-ethoxy)-ethoxy]-acetyl)₂-(γ-Glu)-(10-(4-carboxyphenoxy)decanoyl))AQ-Aib-EFI-(D-Glu)-αMeY-LIK((2-[2-(2-Amino-ethoxy)-ethoxy]-acetyl)₂-(γ-Glu)-(10-(4-carboxyphenoxy)decanoyl))GGPSSGAPPPS-NH₂ | 336 | 5576.22 |
| 327 | Y-Aib-EGT-αMeF(2F)-TSD-hTyr-SI-αMeL-LD-Orn-K((2-[2-(2-Amino-ethoxy)-ethoxy]-acetyl)₂-(γ-Glu)-(10-(4-carboxyphenoxy)decanoyl))AQ-Aib-EFI-(D-Glu)-αMeY-LIK((2-[2-(2-Amino-ethoxy)-ethoxy]-acetyl)₂-(γ-Glu)-(10-(4-carboxyphenoxy)decanoyl))GGPSSGAPPPS-NH₂ | 337 | 5656.26 |
| 328 | Y-Aib-EGT-αMeF(2F)-TSD-Nle-SI-αMeL-LD-Orn-K((2-[2-(2-Amino-ethoxy)-ethoxy]-acetyl)₂-(γ-Glu)-(10-(4-carboxyphenoxy)decanoyl))AQ-Aib-EFI-(D-Glu)-αMeY-LIK((2-[2-(2-Amino-ethoxy)-ethoxy]-acetyl)₂-(γ-Glu)-(10-(4-carboxyphenoxy)decanoyl))GGPSSGAPPPS-NH₂ | 338 | 5592.22 |
| 329 | Y-Aib-EGT-αMeF(2F)-TSDV-Aib-I-αMeL-LD-Orn-IAQ-Aib-K((2-[2-(2-Amino-ethoxy)-ethoxy]-acetyl)₂-(γ-Glu)-CO-(CH₂)₁₂-CO₂H)FI-(D-Glu)-αMeY-LIK((2-[2-(2-Amino-ethoxy)-ethoxy]-acetyl)₂-(γ-Glu)-CO-(CH₂)₁₂-CO₂H)GGPSSGAPPPS-NH₂ | 339 | 5460.24 |
| 330 | Y-Aib-EGT-αMeF(2F)-TSDV-Aib-I-αMeL-LD-Orn-IAQ-Aib-K((2-[2-(2-Amino-ethoxy)-ethoxy]-acetyl)₂-(γ-Glu)-(10-(4-carboxyphenoxy)decanoyl))FI-(D-Glu)-αMeY-LIK((2-[2-(2-Amino-ethoxy)-ethoxy]-acetyl)₂-(γ-Glu)-(10-(4-carboxyphenoxy)decanoyl))GGPSSGAPPPS-NH₂ | 340 | 5560.27 |
| 331 | Y-Aib-EGT-αMeF(2F)-TSD-4Pal-Aib-I-αMeL-LD-Orn-IAQ-Aib-K((2-[2-(2-Amino-ethoxy)-ethoxy]-acetyl)₂-(γ-Glu)-(11-(4-carboxyphenoxy)undecanoyl)FI-(D-Glu)-αMeY-LIK((2-[2-(2-Amino-ethoxy)-ethoxy]-acetyl)₂-(γ-Glu)-(11-(4-carboxyphenoxy)undecanoyl)GGPSSGAPPPS-NH₂ | 341 | 5637.35 |
| 332 | Y-Aib-EGT-αMeF(2F)-TSD-hTyr-SI-αMeL-LD-Orn-IAQ-Aib-K((2-[2-(2-Amino-ethoxy)-ethoxy]-acetyl)₂-(γ-Glu)-(10-(4-carboxyphenoxy)decanoyl))FI-(D-Glu)-αMeY-LIK((2-[2-(2-Amino-ethoxy)-ethoxy]-acetyl)₂-(γ-Glu)-(10-(4-carboxyphenoxy)decanoyl))GGPSSGAPPPS-NH₂ | 342 | 5640.31 |
| 333 | Y-Aib-EGT-αMeF(2F)-TSD-Nle-SI-αMeL-LD-Orn-IAQ-Aib-K((2-[2-(2-Amino-ethoxy)-ethoxy]-acetyl)₂-(γ-Glu)-(10-(4-carboxyphenoxy)decanoyl))FI-(D-Glu)-αMeY-LIK((2-[2-(2-Amino-ethoxy)-ethoxy]-acetyl)₂-(γ-Glu)-(10-(4-carboxyphenoxy)decanoyl))GGPSSGAPPPS-NH₂ | 343 | 5576.27 |
| 334 | Y-Aib-EGT-αMeF(2F)-TSD-4Pal-Aib-I-αMeL-LD-Orn-K((2-[2-(2-Amino-ethoxy)-ethoxy]-acetyl)₂-(γ-Glu)-CO-(CH₂)₁₀-CH₃)AQ-Aib-EFI-(D-Glu)-αMeY-LIK((2-[2-(2-Amino-ethoxy)-ethoxy]-acetyl)₂-(γ-Glu)-CO-(CH₂)₁₀-CH₃)GGPSSGAPPPS-NH₂ | 344 | 5409.15 |
| 335 | Y-Aib-EGT-αMeF(2F)-TSD-hTyr-SI-αMeL-LD-Orn-K((2-[2-(2-Amino-ethoxy)-ethoxy]-acetyl)₂-(γ-Glu)-CO-(CH₂)₁₀-CH₃)AQ-Aib-EFI-(D-Glu)-αMeY-LIK((2-[2-(2-Amino-ethoxy)-ethoxy]-acetyl)₂-(γ-Glu)-CO-(CH₂)₁₀-CH₃)GGPSSGAPPPS-NH₂ | 345 | 5440.16 |
| 336 | Y-Aib-EGT-αMeF(2F)-TSD-4Pal-Aib-I-αMeL-LD-Orn-K((2-[2-(2-Amino-ethoxy)-ethoxy]-acetyl)-(γ-Glu)-CO-(CH₂)₁₂-CO₂H)AQ-Aib-K((2-[2-(2-Amino-ethoxy)-ethoxy]-acetyl)-(γ-Glu)-CO-(CH₂)₁₂-CO₂H)FI-(D-Glu)-αMeY-LIEGGPSSGAPPPS-NH₂ | 346 | 5234.91 |
| 337 | Y-Aib-EGT-αMeF(2F)-TSD-4Pal-Aib-I-αMeL-LD-Orn-K((2-[2-(2-Amino-ethoxy)-ethoxy]-acetyl)-(γ-Glu)-CO-(CH₂)₁₂-CO₂H)AQ-Aib-EFI-(D-Glu)-αMeY-LIK((2-[2-(2-Amino-ethoxy)-ethoxy]-acetyl)-(γ-Glu)-CO-(CH₂)₁₂-CO₂H)GGPSSGAPPPS-NH₂ | 347 | 5234.91 |
| 338 | Y-Aib-EGT-αMeF(2F)-TSD-4Pal-Aib-I-αMeL-LD-Orn-K((2-[2-(2-Amino-ethoxy)-ethoxy]-acetyl)-(γ-Glu)-CO-(CH₂)₁₂-CO₂H)AQ-Aib-EFI-(D-Glu)-αMeY-LIEGGPSSGAPPPSK((2-[2-(2-Amino-ethoxy)-ethoxy]-acetyl)-(γ-Glu)-CO-(CH₂)₁₂-CO₂H)-NH₂ | 348 | 5364.02 |
| 339 | Y-Aib-EGT-αMeF(2F)-TSD-4Pal-Aib-I-αMeL-LD-Orn-IAQ-Aib-EFIK((2-[2-(2-Amino-ethoxy)-ethoxy]-acetyl)-(γ-Glu)-CO-(CH₂)₁₂-CO₂H)-αMeY-LIK((2-[2-(2-Amino-ethoxy)-ethoxy]-acetyl)-(γ-Glu)-CO-(CH₂)₁₂-CO₂H)GGPSSGAPPPS-NH₂ | 349 | 5218.95 |
| 340 | Y-Aib-EGT-αMeF(2F)-TSD-4Pal-Aib-I-αMeL-LD-Orn-IAQ-Aib-K((2-[2-(2-Amino-ethoxy)-ethoxy]-acetyl)-(γ-Glu)-CO-(CH₂)₁₂-CO₂H)FI-(D-Glu)-αMeY-LIK((2-[2-(2-Amino-ethoxy)-ethoxy]-acetyl)-(γ-Glu)-CO-(CH₂)₁₂-CO₂H)GGPSSGAPPPS-NH₂ | 350 | 5218.95 |
| 341 | Y-Aib-EGT-αMeF(2F)-TSD-4Pal-Aib-I-αMeL-LD-Orn-IAQ-Aib-K((2-[2-(2-Amino-ethoxy)-ethoxy]-acetyl)-(γ-Glu)-CO-(CH₂)₁₂-CO₂H)FI-(D-Glu)-αMeY-LIEGGPSSGAPPPSK((2-[2-(2-Amino-ethoxy)-ethoxy]-acetyl)-(γ-Glu)-CO-(CH₂)₁₂-CO₂H)-NH₂ | 351 | 5348.07 |
| 342 | Y-Aib-EGT-αMeF(2F)-TSD-4Pal-Aib-I-αMeL-LD-Orn-IAQ-Aib-EFIK((2-[2-(2-Amino-ethoxy)-ethoxy]-acetyl)₃-(γ-Glu)-CO-(CH₂)₁₂-CO₂H)-αMeY-LIK((2-[2-(2-Amino-ethoxy)-ethoxy]-acetyl)₃-(γ-Glu)-CO-(CH₂)₁₂-CO₂H)GGPSSGAPPPS-NH₂ | 352 | 5799.58 |
| 343 | Y-Aib-EGT-αMeF(2F)-TSDY-Aib-I-αMeL-LD-Orn-IAQ-Aib-EFIK((2-[2-(2-Amino-ethoxy)-ethoxy]-acetyl)₃-(γ-Glu)-CO-(CH₂)₁₂-CO₂H)-αMeY-LIK((2-[2-(2-Amino-ethoxy)-ethoxy]-acetyl)₃-(γ-Glu)-CO-(CH₂)₁₂-CO₂H)GGPSSGAPPPS-NH₂ | 353 | 5814.59 |
| 344 | Y-Aib-EGT-αMeF(2F)-TSDV-Aib-I-αMeL-LD-Orn-IAQ-Aib-EFIK((2-[2-(2-Amino-ethoxy)-ethoxy]-acetyl)₃-(γ-Glu)-CO-(CH₂)₁₂-CO₂H)-αMeY-LIK((2-[2-(2-Amino-ethoxy)-ethoxy]-acetyl)₃-(γ-Glu)-CO-(CH₂)₁₂-CO₂H)GGPSSGAPPPS-NH₂ | 354 | 5750.55 |
| 345 | Y-Aib-EGT-αMeF(2F)-TSD-4Pal-Aib-I-αMeL-LD-Orn-IAQ-Aib-EFIK((2-[2-(2-Amino-ethoxy)-ethoxy]-acetyl)₃-(γ-Glu)-(10-(4-carboxyphenoxy)decanoyl))-αMeY-LIK((2-[2-(2-Amino-ethoxy)-ethoxy]-acetyl)₃-(γ-Glu)-(10-(4-carboxyphenoxy)decanoyl))GGPSSGAPPPS-NH₂ | 355 | 5899.61 |
| 346 | Y-Aib-EGT-αMeF(2F)-TSDY-Aib-I-αMeL-LD-Orn-IAQ-Aib-EFIK((2-[2-(2-Amino-ethoxy)-ethoxy]-acetyl)₃-(γ-Glu)-(10-(4-carboxyphenoxy)decanoyl)-αMeY-LIK((2-[2-(2-Amino-ethoxy)-ethoxy]-acetyl)₃-(γ-Glu)-(10-(4-carboxyphenoxy)decanoyl)GGPSSGAPPPS-NH₂ | 356 | 5914.62 |
| 347 | Y-Aib-EGT-αMeF(2F)-TSDV-Aib-I-αMeL-LD-Orn-IAQ-Aib-EFIK((2-[2-(2-Amino-ethoxy)-ethoxy]-acetyl)₃-(γ-Glu)-(10-(4-carboxyphenoxy)decanoyl)-αMeY-LIK((2-[2-(2-Amino-ethoxy)-ethoxy]-acetyl)₃-(γ-Glu)-(10-(4-carboxyphenoxy)decanoyl)GGPSSGAPPPS-NH₂ | 357 | 5850.58 |
| 348 | Y-Aib-EGT-αMeF(2F)-TSD-4Pal-Aib-I-αMeL-LD-Orn-K((2-[2-(2-Amino-ethoxy)-ethoxy]-acetyl)₂-(γ-Glu)-CO-(CH₂)₁₂-CO₂H)AQ-Aib-Orn-FI-(D-Glu)-αMeY-LIK((2-[2-(2-Amino-ethoxy)-ethoxy]-acetyl)₂-(γ-Glu)-CO-(CH₂)₁₂-CO₂H)GGPSSGAPPPS-NH₂ | 358 | 5510.25 |
| 349 | Y-Aib-EGT-γMeF(2F)-TSDY-Aib-I-αMeL-LD-Orn-K((2-[2-(2-Amino-ethoxy)-ethoxy]-acetyl)₂-(γ-Glu)-CO-(CH₂)₁₂-CO₂H)AQ-Aib-Orn-FI-(D-Glu)-αMeY-LIK((2-[2-(2-Amino-ethoxy)-ethoxy]-acetyl)₂-(γ-Glu)-CO-(CH₂)₁₂-CO₂H)GGPSSGAPPPS-NH₂ | 359 | 5525.27 |
| 350 | Y-Aib-EGT-αMeF(2F)-TSDV-Aib-I-αMeL-LD-Orn-K((2-[2-(2-Amino-ethoxy)-ethoxy]-acetyl)₂-(γ-Glu)-CO-(CH₂)₁₂-CO₂H)AQ-Aib-Orn-FI-(D-Glu)-αMeY-LIK((2-[2-(2-Amino-ethoxy)-ethoxy]-acetyl)₂-(γ-Glu)-CO-(CH₂)₁₂-CO₂H)GGPSSGAPPPS-NH₂ | 360 | 5461.22 |
| 351 | Y-Aib-EGT-αMeF(2F)-TSD-4Pal-Aib-I-αMeL-LD-Orn-K((2-[2-(2-Amino-ethoxy)-ethoxy]-acetyl)₂-(α-Glu)-(10-(4-carboxyphenoxy)decanoyl))AQ-Aib-Om-FI-(D-Glu)-αMeY-LIK((2-[2-(2-Amino-ethoxy)-ethoxy]-acetyl)₂-(γ-Glu)-(10-(4-carboxyphenoxy)decanoyl))GGPSSGAPPPS-NH₂ | 361 | 5610.29 |
| 352 | Y-Aib-EGT-αMeF(2F)-TSDY-Aib-I-αMeL-LD-Orn-K((2-[2-(2-Amino-ethoxy)-ethoxy]-acetyl)₂-(γ-Glu)-(10-(4-carboxyphenoxy)decanoyl))AQ-Aib-Om-FI-(D-Glu)-αMeY-LIK((2-[2-(2-Amino-ethoxy)-ethoxy]-acetyl)₂-(γ-Glu)-(10-(4-carboxyphenoxy)decanoyl))GGPSSGAPPPS-NH₂ | 362 | 5625.3 |
| 353 | Y-Aib-EGT-αMeF(2F)-TSDV-Aib-I-αMeL-LD-Orn-K((2-[2-(2-Amino-ethoxy)-ethoxy]-acetyl)₂-(γ-Glu)-(10-(4-carboxyphenoxy)decanoyl))AQ-Aib-Om-FI-(D-Glu)-αMeY-LIK((2-[2-(2-Amino-ethoxy)-ethoxy]-acetyl)₂-(γ-Glu)-(10-(4-carboxyphenoxy)decanoyl))GGPSSGAPPPS-NH₂ | 363 | 5561.25 |
| 354 | Y-Aib-EGT-αMeF(2F)-TSD-4Pal-Aib-I-αMeL-LD-Orn-IAQ-Aib-Orn-FIK((2-[2-(2-Amino-ethoxy)-ethoxy]-acetyl)₂-(γ-Glu)-(10-(4-carboxyphenoxy)decanoyl))-αMeY-LIK((2-[2-(2-Amino-ethoxy)-ethoxy]-acetyl)₂-(γ-Glu)-(10-(4-carboxyphenoxy)decanoyl))GGPSSGAPPPS-NH₂ | 364 | 5594.33 |
| 355 | Y-Aib-EGT-αMeF(2F)-TSDY-Aib-I-αMeL-LD-Orn-IAQ-Aib-Orn-FIK((2-[2-(2-Amino-ethoxy)-ethoxy]-acetyl)₂-(γ-Glu)-(10-(4-carboxyphenoxy)decanoyl))-αMeY-LIK((2-[2-(2-Amino-ethoxy)-ethoxy]-acetyl)₂-(γ-Glu)-(10-(4-carboxyphenoxy)decanoyl))GGPSSGAPPPS-NH₂ | 365 | 5609.34 |
| 356 | Y-Aib-EGT-αMeF(2F)-TSDV-Aib-I-αMeL-LD-Orn-IAQ-Aib-Orn-FIK((2-[2-(2-Amino-ethoxy)-ethoxy]-acetyl)₂-(γ-Glu)-(10-(4-carboxyphenoxy)decanoyl))-αMeY-LIK((2-[2-(2-Amino-ethoxy)-ethoxy]-acetyl)₂-(γ-Glu)-(10-(4-carboxyphenoxy)decanoyl))GGPSSGAPPPS-NH₂ | 366 | 5545.3 |
| 357 | Y-Aib-EGT-αMeF(2F)-TSD-4Pal-Aib-I-αMeL-LD-Orn-K((2-[2-(2-Amino-ethoxy)-ethoxy]-acetyl)₂-(γ-Glu)-CO-(CH₂)₁₂-CO₂H)AQ-Aib-K((2-[2-(2-Amino-ethoxy)-ethoxy]-acetyl)₂-(γ-Glu)-CO-(CH₂)₁₂-CO₂H)FI-(D-Glu)-αMeY-LIEGGPSSGAPPPS-NH₂ | 367 | 5525.22 |
| 358 | Y-Aib-EGT-αMeF(2F)-TSD-4Pal-Aib-I-αMeL-LD-Orn-K((2-[2-(2-Amino-ethoxy)-ethoxy]-acetyl)₂-(γ-Glu)-CO-(CH₂)₁₂-CO₂H)AQ-Aib-EFI-(D-Glu)-αMeY-LIK((2-[2-(2-Amino-ethoxy)-ethoxy]-acetyl)₂-(γ-Glu)-CO-(CH₂)₁₂-CO₂H)GGPSSGAPPPS-NH₂ | 368 | 5525.22 |
| 359 | Y-Aib-EGT-αMeF(2F)-TSD-4Pal-Aib-I-αMeL-LD-Orn-K((2-[2-(2-Amino-ethoxy)-ethoxy]-acetyl)₂-(γ-Glu)-CO-(CH₂)₁₂-CO₂H)AQ-Aib-EFI-(D-Glu)-αMeY-LIEGGPSSGAPPPSK((2-[2-(2-Amino-ethoxy)-ethoxy]-acetyl)₂-(γ-Glu)-CO-(CH₂)₁₂-CO₂H)-NH₂ | 369 | 5654.34 |
| 360 | Y-Aib-EGT-αMeF(2F)-TSD-4Pal-Aib-I-αMeL-LD-Orn-K((2-[2-(2-Amino-ethoxy)-ethoxy]-acetyl)-(γ-Glu)-(10-(4-carboxyphenoxy)decanoyl))AQ-Aib-K((2-[2-(2-Amino-ethoxy)-ethoxy]-acetyl)-(γ-Glu)-(10-(4-carboxyphenoxy)decanoyl))FI-(D-Glu)-αMeY-LIEGGPSSGAPPPS-NH₂ | 370 | 5334.94 |
| 361 | Y-Aib-EGT-αMeF(2F)-TSD-4Pal-Aib-I-αMeL-LD-Orn-K((2-[2-(2-Amino-ethoxy)-ethoxy]-acetyl)-(γ-Glu)-(10-(4-carboxyphenoxy)decanoyl))AQ-Aib-EFIe-αMeY-LIK((2-[2-(2-Amino-ethoxy)-ethoxy]-acetyl)-(γ-Glu)-(10-(4-carboxyphenoxy)decanoyl))GGPSSGAPPPS-NH₂ | 371 | 5334.94 |
| 362 | Y-Aib-EGT-αMeF(2F)-TSD-4Pal-Aib-I-αMeL-LD-Orn-K((2-[2-(2-Amino-ethoxy)-ethoxy]-acetyl)-(y-Glu)-(10-(4-carboxyphenoxy)decanoyl))AQ-Aib-EFI-(D-Glu)-αMeY-LIEGGPSSGAPPPSK((2-[2-(2-Amino-ethoxy)-ethoxy]-acetyl)-(γ-Glu)-(10-(4-carboxyphenoxy)decanoyl))-NH₂ | 372 | 5464.05 |
| 363 | Y-Aib-EGT-αMeF(2F)-TSDY-Aib-I-αMeL-LD-Orn-IAQ-Aib-EFIK((2-[2-(2-Amino-ethoxy)-ethoxy]-acetyl)₂-(γ-Glu)-(2-[2-(2-Amino-ethoxy)-ethoxy]-acetyl)-CO-(CH₂)₁₂-CO₂H)-αMeY-LIK((2-[2-(2-Amino-ethoxy)-ethoxy]-acetyl)₂-(γ-Glu)-(2-[2-(2-Amino-ethoxy)-ethoxy]-acetyl)-CO-(CH₂)₁₂-CO₂H)GGPSSGAPPPS-NH₂ | 373 | 5814.59 |
| 364 | Y-Aib-EGT-αMeF(2F)-TSDY-Aib-I-αMeL-LD-Orn-IAQ-Aib-EFIK((2-[2-(2-Amino-ethoxy)-ethoxy]-acetyl)-(γ-Glu)-(2-[2-(2-Amino-ethoxy)-ethoxy]-acetyl)₂-CO-(CH₂)₁₂-CO₂H)-αMeY-LIK((2-[2-(2-Amino-ethoxy)-ethoxy]-acetyl)-(γ-Glu)-(2-[2-(2-Amino-ethoxy)-ethoxy]-acetyl)₂-CO-(CH₂)₁₂-CO₂H)GGPSSGAPPPS-NH₂ | 374 | 5814.59 |
| 365 | Y-Aib-EGT-αMeF(2F)-TSDY-Aib-I-αMeL-LD-Orn-IAQ-Aib-EFIK((2-[2-(2-Amino-ethoxy)-ethoxy]-acetyl)-(γ-Glu)-(2-[2-(2-Amino-ethoxy)-ethoxy]-acetyl)-CO-(CH₂)₁₂-CO₂H)-αMeY-LIK((2-[2-(2-Amino-ethoxy)-ethoxy]-acetyl)-(γ-Glu)-(2-[2-(2-Amino-ethoxy)-ethoxy]-acetyl)-CO-(CH₂)₁₂-CO₂H)GGPSSGAPPPS-NH₂ | 375 | 5524.28 |
| 366 | Y-Aib-EGT-αMeF(2F)-TSDY-Aib-I-αMeL-LD-Orn-K((2-[2-(2-Amino-ethoxy)-ethoxy]-acetyl)-(γ-Glu)-CO-(CH₂)₁₂-CO₂H)AQ-Aib-K((2-[2-(2-Amino-ethoxy)-ethoxy]-acetyl)-(γ-Glu)-CO-(CH₂)₁₂-CO₂H)FI-(D-Glu)-αMeY-LIEGGPSSGAPPPS-NH₂ | 376 | 5249.92 |
| 367 | Y-Aib-EGT-αMeF(2F)-TSDY-Aib-I-αMeL-LD-Orn-K((2-[2-(2-Amino-ethoxy)-ethoxy]-acetyl)-(γ-Glu)-CO-(CH₂)₁₂-CO₂H)AQ-Aib-EFI-(D-Glu)-αMeY-LIK((2-[2-(2-Amino-ethoxy)-ethoxy]-acetyl)-(γ-Glu)-CO-(CH₂)₁₂-CO₂H)GGPSSGAPPPS-NH₂ | 377 | 5249.92 |
| 368 | Y-Aib-EGT-αMeF(2F)-TSDY-Aib-I-αMeL-LD-Orn-K((2-[2-(2-Amino-ethoxy)-ethoxy]-acetyl)-(γ-Glu)-CO-(CH₂)₁₂-CO₂H)AQ-Aib-EFI-(D-Glu)-αMeY-LIEGGPSSGAPPPSK((2-[2-(2-Amino-ethoxy)-ethoxy]-acetyl)-(γ-Glu)-CO-(CH₂)₁₂-CO₂H)-NH₂ | 378 | 5379.03 |
| 369 | Y-Aib-EGT-αMeF(2F)-TSDY-Aib-I-αMeL-LD-Orn-IAQ-Aib-EFIK((2-[2-(2-Amino-ethoxy)-ethoxy]-acetyl)-(γ-Glu)-CO-(CH₂)₁₂-CO₂H)-αMeY-LIK((2-[2-(2-Amino-ethoxy)-ethoxy]-acetyl)-(γ-Glu)-CO-(CH₂)₁₂-CO₂H)GGPSSGAPPPS-NH₂ | 379 | 5233.96 |
| 370 | Y-Aib-EGT-αMeF(2F)-TSDY-Aib-I-αMeL-LD-Orn-IAQ-Aib-K((2-[2-(2-Amino-ethoxy)-ethoxy]-acetyl)-(γ-Glu)-CO-(CH₂)₁₂-CO₂H)FI-(D-Glu)-αMeY-LIK((2-[2-(2-Amino-ethoxy)-ethoxy]-acetyl)-(γ-Glu)-CO-(CH₂)₁₂-CO₂H)GGPSSGAPPPS-NH₂ | 380 | 5233.96 |
| 371 | Y-Aib-EGT-αMeF(2F)-TSDY-Aib-I-αMeL-LD-Orn-IAQ-Aib-K((2-[2-(2-Amino-ethoxy)-ethoxy]-acetyl)-(γ-Glu)-CO-(CH₂)₁₂-CO₂H)FI-(D-Glu)-αMeY-LIEGGPSSGAPPPSK((2-[2-(2-Amino-ethoxy)-ethoxy]-acetyl)-(γ-Glu)-CO-(CH₂)₁₂-CO₂H)-NH₂ | 381 | 5363.08 |
| 372 | Y-Aib-EGT-αMeF(2F)-TSDY-Aib-I-αMeL-LD-Orn-K((2-[2-(2-Amino-ethoxy)-ethoxy]-acetyl)-(γ-Glu)-(10-(4-carboxyphenoxy)decanoyl))AQ-Aib-K((2-[2-(2-Amino-ethoxy)-ethoxy]-acetyl)-(γ-Glu)-(10-(4-carboxyphenoxy)decanoyl))FI-(D-Glu)-αMeY-LIEGGPSSGAPPPS-NH₂ | 382 | 5349.95 |
| 373 | Y-Aib-EGT-αMeF(2F)-TSDY-Aib-I-αMeL-LD-Orn-K((2-[2-(2-Amino-ethoxy)-ethoxy]-acetyl)-(γ-Glu)-(10-(4-carboxyphenoxy)decanoyl))AQ-Aib-EFI-(D-Glu)-αMeY-LIK((2-[2-(2-Amino-ethoxy)-ethoxy]-acetyl)-(γ-Glu)-(10-(4-carboxyphenoxy)decanoyl))GGPSSGAPPPS-NH₂ | 383 | 5349.95 |
| 374 | Y-Aib-EGT-αMeF(2F)-TSDY-Aib-I-αMeL-LD-Orn-K((2-[2-(2-Amino-ethoxy)-ethoxy]-acetyl)-(γ-Glu)-(10-(4-carboxyphenoxy)decanoyl))AQ-Aib-EFI-(D-Glu)-αMeY-LIEGGPSSGAPPPSK((2-[2-(2-Amino-ethoxy)-ethoxy]-acetyl)-(γ-Glu)-(10-(4-carboxyphenoxy)decanoyl))-NH₂ | 384 | 5479.07 |
| 375 | Y-Aib-EGT-αMeF(2F)-TSDY-Aib-I-αMeL-LD-Orn-IAQ-Aib-EFIK((2-[2-(2-Amino-ethoxy)-ethoxy]-acetyl)-(γ-Glu)-(10-(4-carboxyphenoxy)decanoyl))-αMeY-LIK((2-[2-(2-Amino-ethoxy)-ethoxy]-acetyl)-(γ-Glu)-(10-(4-carboxyphenoxy)decanoyl))GGPSSGAPPPS-NH₂ | 385 | 5334 |
| 376 | Y-Aib-EGT-αMeF(2F)-TSDY-Aib-I-αMeL-LD-Orn-IAQ-Aib-K((2-[2-(2-Amino-ethoxy)-ethoxy]-acetyl)-(γ-Glu)-(10-(4-carboxyphenoxy)decanoyl))FI-(D-Glu)-αMeY-LIK((2-[2-(2-Amino-ethoxy)-ethoxy]-acetyl)-(γ-Glu)-(10-(4-carboxyphenoxy)decanoyl))GGPSSGAPPPS-NH₂ | 386 | 5334 |
| 377 | Y-Aib-EGT-αMeF(2F)-TSDY-Aib-I-αMeL-LD-Orn-IAQ-Aib-K((2-[2-(2-Amino-ethoxy)-ethoxy]-acetyl)-(γ-Glu)-(10-(4-carboxyphenoxy)decanoyl))FI-(D-Glu)-αMeY-LIEGGPSSGAPPPSK((2-[2-(2-Amino-ethoxy)-ethoxy]-acetyl)-(γ-Glu)-(10-(4-carboxyphenoxy)decanoyl))-NH₂ | 387 | 5463.11 |
| 378 | Y-Aib-EGT-αMeF(2F)-TSDV-Aib-I-αMeL-LD-Orn-K((2-[2-(2-Amino-ethoxy)-ethoxy]-acetyl)-(γ-Glu)-(10-(4-carboxyphenoxy)decanoyl))AQ-Aib-K((2-[2-(2-Amino-ethoxy)-ethoxy]-acetyl)-(γ-Glu)-(10-(4-carboxyphenoxy)decanoyl))FI-(D-Glu)-αMeY-LIEGGPSSGAPPPS-NH₂ | 388 | 5285.91 |
| 379 | Y-Aib-EGT-αMeF(2F)-TSDV-Aib-I-αMeL-LD-Orn-K((2-[2-(2-Amino-ethoxy)-ethoxy]-acetyl)-(γ-Glu)-(10-(4-carboxyphenoxy)decanoyl))AQ-Aib-EFI-(D-Glu)-αMeY-LIK((2-[2-(2-Amino-ethoxy)-ethoxy]-acetyl)-(γ-Glu)-(10-(4-carboxyphenoxy)decanoyl))GGPSSGAPPPS-NH₂ | 389 | 5285.91 |
| 380 | Y-Aib-EGT-αMeF(2F)-TSDV-Aib-I-αMeL-LD-Orn-K((2-[2-(2-Amino-ethoxy)-ethoxy]-acetyl)₂-(γ-Glu)-(10-(4-carboxyphenoxy)decanoyl))AQ-Aib-EFI-(D-Glu)-αMeY-LIEGGPSSGAPPPSK((2-[2-(2-Amino-ethoxy)-ethoxy]-acetyl)₂-(γ-Glu)-(10-(4-carboxyphenoxy)decanoyl))-NH₂ | 390 | 5705.34 |
| 381 | Y-Aib-EGT-αMeF(2F)-TSDV-Aib-I-αMeL-LD-Orn-IAQ-Aib-EFIK((2-[2-(2-Amino-ethoxy)-ethoxy]-acetyl)-(γ-Glu)-(10-(4-carboxyphenoxy)decanoyl))-αMeY-LIK((2-[2-(2-Amino-ethoxy)-ethoxy]-acetyl)-(γ-Glu)-(10-(4-carboxyphenoxy)decanoyl))GGPSSGAPPPS-NH₂ | 391 | 5269.95 |
| 382 | Y-Aib-EGT-αMeF(2F)-TSDV-Aib-I-αMeL-LD-Orn-IAQ-Aib-K((2-[2-(2-Amino-ethoxy)-ethoxy]-acetyl)-(γ-Glu)-(10-(4-carboxyphenoxy)decanoyl))FI-(D-Glu)-αMeY-LIK((2-[2-(2-Amino-ethoxy)-ethoxy]-acetyl)-(γ-Glu)-(10-(4-carboxyphenoxy)decanoyl))GGPSSGAPPPS-NH₂ | 392 | 5269.95 |
| 383 | Y-Aib-EGT-αMeF(2F)-TSDV-Aib-I-αMeL-LD-Orn-IAQ-Aib-K((2-[2-(2-Amino-ethoxy)-ethoxy]-acetyl)₂-(γ-Glu)-(10-(4-carboxyphenoxy)decanoyl))FI-(D-Glu)-αMeY-LIEGGPSSGAPPPSK((2-[2-(2-Amino-ethoxy)-ethoxy]-acetyl)₂-(γ-Glu)-(10-(4-carboxyphenoxy)decanoyl))-NH₂ | 393 | 5689.38 |
| 384 | Y-Aib-EGT-αMeF(2F)-TSD-4Pal-Aib-I-αMeL-LD-Orn-K((2-[2-(2-Amino-ethoxy)-ethoxy]-acetyl)₂-CO-(CH₂)₁₂-CO₂H)AQ-Aib-K((2-[2-(2-Amino-ethoxy)-ethoxy]-acetyl)₂-CO-(CH₂)₁₂-CO₂H)FI-(D-Glu)-αMeY-LIEGGPSSGAPPPS-NH₂ | 394 | 5266.99 |
| 385 | Y-Aib-EGT-αMeF(2F)-TSDY-Aib-I-αMeL-LD-Orn-K((2-[2-(2-Amino-ethoxy)-ethoxy]-acetyl)₂-CO-(CH₂)₁₂-CO₂H)AQ-Aib-K((2-[2-(2-Amino-ethoxy)-ethoxy]-acetyl)₂-CO-(CH₂)₁₂-CO₂H)FI-(D-Glu)-αMeY-LIEGGPSSGAPPPS-NH₂ | 395 | 5282.01 |
| 386 | Y-Aib-EGT-αMeF(2F)-TSDV-Aib-I-αMeL-LD-Orn-K((2-[2-(2-Amino-ethoxy)-ethoxy]-acetyl)₂-CO-(CH₂)₁₂-CO₂H)AQ-Aib-K((2-[2-(2-Amino-ethoxy)-ethoxy]-acetyl)₂-CO-(CH₂)₁₂-CO₂H)FI-(D-Glu)-αMeY-LIEGGPSSGAPPPS-NH₂ | 396 | 5217.96 |
| 387 | Y-Aib-EGT-αMeF(2F)-TSD-4Pal-Aib-I-αMeL-LD-Orn-K((2-[2-(2-Amino-ethoxy)-ethoxy]-acetyl)₂-CO-(CH₂)₁₂-CO₂H)AQ-Aib-EFI-(D-Glu)-αMeY-LIK((2-[2-(2-Amino-ethoxy)-ethoxy]-acetyl)₂-CO-(CH₂)₁₂-CO₂H)GGPSSGAPPPS-NH₂ | 397 | 5266.99 |
| 388 | Y-Aib-EGT-αMeF(2F)-TSDY-Aib-I-αMeL-LD-Orn-K((2-[2-(2-Amino-ethoxy)-ethoxy]-acetyl)₂-CO-(CH₂)₁₂-CO₂H)AQ-Aib-EFI-(D-Glu)-αMeY-LIK((2-[2-(2-Amino-ethoxy)-ethoxy]-acetyl)₂-CO-(CH₂)₁₂-CO₂H)GGPSSGAPPPS-NH₂ | 398 | 5282.01 |
| 389 | Y-Aib-EGT-αMeF(2F)-TSDV-Aib-I-αMeL-LD-Orn-K((2-[2-(2-Amino-ethoxy)-ethoxy]-acetyl)₂-CO-(CH₂)₁₂-CO₂H)AQ-Aib-EFI-(D-Glu)-αMeY-LIK((2-[2-(2-Amino-ethoxy)-ethoxy]-acetyl)₂-CO-(CH₂)₁₂-CO₂H)GGPSSGAPPPS-NH₂ | 399 | 5217.96 |
| 390 | Y-Aib-EGT-αMeF(2F)-TSDV-Aib-I-αMeL-LD-Orn-QAQ-Aib-EFIK((2-[2-(2-Amino-ethoxy)-ethoxy]-acetyl)₂-(γ-Glu)-CO-(CH₂)₁₂-CO₂H)-αMeY-LIK((2-[2-(2-Amino-ethoxy)-ethoxy]-acetyl)₂-(γ-Glu)-CO-(CH₂)₁₂-CO₂H)GGPSSGAPPPS-NH₂ | 400 | 5475.21 |
| 391 | Y-Aib-EGT-αMeF(2F)-TSD-4Pal-Aib-I-αMeL-LD-Orn-QAQ-Aib-Orn-FIK((2-[2-(2-Amino-ethoxy)-ethoxy]-acetyl)₂-(γ-Glu)-CO-(CH₂)₁₂-CO₂H)-αMeY-LIK((2-[2-(2-Amino-ethoxy)-ethoxy]-acetyl)₂-(γ-Glu)-CO-(CH₂)₁₂-CO₂H)GGPSSGAPPPS-NH₂ | 401 | 5509.27 |
| 392 | Y-Aib-EGT-αMeF(2F)-TSD-4Pal-Aib-I-αMeL-LD-Orn-K((2-[2-(2-Amino-ethoxy)-ethoxy]-acetyl)₂-(10-(4-carboxyphenoxy)decanoyl))AQ-Aib-K((2-[2-(2-Amino-ethoxy)-ethoxy]-acetyl)₂-(10-(4-carboxyphenoxy)decanoyl))FI-(D-Glu)-αMeY-LIEGGPSSGAPPPS-NH₂ | 402 | 5367.03 |
| 393 | Y-Aib-EGT-αMeF(2F)-TSDY-Aib-I-αMeL-LD-Orn-K((2-[2-(2-Amino-ethoxy)-ethoxy]-acetyl)₂-(10-(4-carboxyphenoxy)decanoyl))AQ-Aib-K((2-[2-(2-Amino-ethoxy)-ethoxy]-acetyl)₂-(10-(4-carboxyphenoxy)decanoyl))FI-(D-Glu)-αMeY-LIEGGPSSGAPPPS-NH₂ | 403 | 5382.04 |
| 394 | Y-Aib-EGT-αMeF(2F)-TSDV-Aib-I-αMeL-LD-Orn-K((2-[2-(2-Amino-ethoxy)-ethoxy]-acetyl)₂-(10-(4-carboxyphenoxy)decanoyl))AQ-Aib-K((2-[2-(2-Amino-ethoxy)-ethoxy]-acetyl)₂-(10-(4-carboxyphenoxy)decanoyl))FI-(D-Glu)-αMeY-LIEGGPSSGAPPPS-NH₂ | 404 | 5318 |
| 395 | Y-Aib-EGT-αMeF(2F)-TSD-4Pal-Aib-I-αMeL-LD-Orn-K((2-[2-(2-Amino-ethoxy)-ethoxy]-acetyl)₂-(10-(4-carboxyphenoxy)decanoyl))AQ-Aib-EFI-(D-Glu)-αMeY-LIK((2-[2-(2-Amino-ethoxy)-ethoxy]-acetyl)₂-(10-(4-carboxyphenoxy)decanoyl))GGPSSGAPPPS-NH₂ | 405 | 5367.03 |
| 396 | Y-Aib-EGT-αMeF(2F)-TSDY-Aib-I-αMeL-LD-Orn-K((2-[2-(2-Amino-ethoxy)-ethoxy]-acetyl)₂-(10-(4-carboxyphenoxy)decanoyl))AQ-Aib-EFI-(D-Glu)-αMeY-LIK((2-[2-(2-Amino-ethoxy)-ethoxy]-acetyl)₂-(10-(4-carboxyphenoxy)decanoyl))GGPSSGAPPPS-NH₂ | 406 | 5382.04 |
| 397 | Y-Aib-EGT-αMeF(2F)-TSDV-Aib-I-αMeL-LD-Orn-K((2-[2-(2-Amino-ethoxy)-ethoxy]-acetyl)₂-(10-(4-carboxyphenoxy)decanoyl))AQ-Aib-EFI-(D-Glu)-αMeY-LIK((2-[2-(2-Amino-ethoxy)-ethoxy]-acetyl)₂-(10-(4-carboxyphenoxy)decanoyl))GGPSSGAPPPS-NH₂ | 407 | 5318 |
| 398 | Y-Aib-EGT-αMeF(2F)-TSDV-Aib-I-αMeL-LD-Orn-K((2-[2-(2-Amino-ethoxy)-ethoxy]-acetyl)-(γ-Glu)-CO-(CH₂)₁₂-CO₂H)AQ-Aib-K((2-[2-(2-Amino-ethoxy)-ethoxy]-acetyl)-(γ-Glu)-CO-(CH₂)₁₂-CO₂H)FI-(D-Glu)-αMeY-LIEGGPSSGAPPPS-NH₂ | 408 | 5185.88 |
| 399 | Y-Aib-EGT-αMeF(2F)-TSDV-Aib-I-αMeL-LD-Orn-K((2-[2-(2-Amino-ethoxy)-ethoxy]-acetyl)-(γ-Glu)-CO-(CH₂)₁₂-CO₂H)AQ-Aib-EFI-(D-Glu)-αMeY-LIK((2-[2-(2-Amino-ethoxy)-ethoxy]-acetyl)-(γ-Glu)-CO-(CH₂)₁₂-CO₂H)GGPSSGAPPPS-NH₂ | 409 | 5185.88 |
| 400 | Y-Aib-EGT-αMeF(2F)-TSDV-Aib-I-αMeL-LD-Orn-IAQ-Aib-EFIK((2-[2-(2-Amino-ethoxy)-ethoxy]-acetyl)-(γ-Glu)-CO-(CH₂)₁₂-CO₂H)-αMeY-LIK((2-[2-(2-Amino-ethoxy)-ethoxy]-acetyl)-(γ-Glu)-CO-(CH₂)₁₂-CO₂H)GGPSSGAPPPS-NH₂ | 410 | 5169.92 |
| 401 | Y-Aib-EGT-αMeF(2F)-TSDY-Aib-I-αMeL-LD-Orn-QAQ-Aib-Orn-FIK((2-[2-(2-Amino-ethoxy)-ethoxy]-acetyl)₂-(γ-Glu)-CO-(CH₂)₁₂-CO₂H)-αMeY-LIK((2-[2-(2-Amino-ethoxy)-ethoxy]-acetyl)₂-(γ-Glu)-CO-(CH₂)₁₂-CO₂H)GGPSSGAPPPS-NH₂ | 411 | 5524.28 |
| 402 | Y-Aib-EGT-αMeF(2F)-TSDY-Aib-I-αMeL-LD-Orn-QAQ-Aib-EFIK((2-[2-(2-Amino-ethoxy)-ethoxy]-acetyl)₂-(γ-Glu)-(10-(4-carboxyphenoxy)decanoyl))-αMeY-LIK((2-[2-(2-Amino-ethoxy)-ethoxy]-acetyl)₂-(γ-Glu)-(10-(4-carboxyphenoxy)decanoyl))GGPSSGAPPPS-NH₂ | 412 | 5639.28 |
| 403 | Y-Aib-EGT-αMeF(2F)-TSD-4Pal-Aib-I-αMeL-LD-Orn-QAQ-Aib-EFIK((2-[2-(2-Amino-ethoxy)-ethoxy]-acetyl)₂-(γ-Glu)-(10-(4-carboxyphenoxy)decanoyl))-αMeY-LIK((2-[2-(2-Amino-ethoxy)-ethoxy]-acetyl)₂-(γ-Glu)-(10-(4-carboxyphenoxy)decanoyl))GGPSSGAPPPS-NH₂ | 413 | 5624.27 |
| 404 | Y-Aib-EGT-αMeF(2F)-TSD-4Pal-Aib-I-αMeL-LD-Orn-K(PEG3-(γ-Glu)-CO-(CH₂)₁₂-CO₂H)AQ-Aib-K(PEG3-(γ-Glu)-CO-(CH₂)₁₂-CO₂H)FI-(D-Glu)-αMeY-LIEGGPSSGAPPPS-NH₂ | 414 | 5351.07 |
| 405 | Y-Aib-EGT-αMeF(2F)-TSD-4Pal-Aib-I-αMeL-LD-Orn-K(PEG4-(γ-Glu)-CO-(CH₂)₁₂-CO₂H)AQ-Aib-K(PEG4-(γ-Glu)-CO-(CH₂)₁₂-CO₂H)FI-(D-Glu)-αMeY-LIEGGPSSGAPPPS-NH₂ | 415 | 5439.17 |
| 406 | Y-Aib-EGT-αMeF(2F)-TSD-4Pal-Aib-I-αMeL-LD-Orn-K((2-[2-(2-Amino-ethoxy)-ethoxy]-acetyl)₂-(γ-Glu)-CO-(CH₂)₁₂-CO₂H)AQ-Aib-K((2-[2-(2-Amino-ethoxy)-ethoxy]-acetyl)₂-(γ-Glu)-CO-(CH₂)₁₂-CO₂H)FI-(D-Glu)-αMeY-LI-Orn-GGPSSGAPPPS-NH₂ | 416 | 5510.25 |
| 407 | Y-Aib-EGT-αMeF(2F)-TSDV-Aib-I-αMeL-LD-Orn-K((2-[2-(2-Amino-ethoxy)-ethoxy]-acetyl)₂-(γ-Glu)-CO-(CH₂)₁₂-CO₂H)AQ-Aib-K((2-[2-(2-Amino-ethoxy)-ethoxy]-acetyl)₂-(γ-Glu)-CO-(CH₂)₁₂-CO₂H)FI-(D-Glu)-αMeY-LI-Orn-GGPSSGAPPPS-NH₂ | 417 | 5461.22 |
| 408 | Y-Aib-EGT-αMeF(2F)-TSD-4Pal-Aib-I-αMeL-LD-Orn-K((2-[2-(2-Amino-ethoxy)-ethoxy]-acetyl)₂-(γ-Glu)-(10-(4-carboxyphenoxy)decanoyl))AQ-Aib-K((2-[2-(2-Amino-ethoxy)-ethoxy]-acetyl)₂-(γ-Glu)-(10-(4-carboxyphenoxy)decanoyl))FI-(D-Glu)-αMeY-LI-Orn-GGPSSGAPPPS-NH₂ | 418 | 5610.29 |
| 409 | Y-Aib-EGT-αMeF(2F)-TSDY-Aib-I-αMeL-LD-Orn-K((2-[2-(2-Amino-ethoxy)-ethoxy]-acetyl)₂-(γ-Glu)-(10-(4-carboxyphenoxy)decanoyl))AQ-Aib-K((2-[2-(2-Amino-ethoxy)-ethoxy]-acetyl)₂-(γ-Glu)-(10-(4-carboxyphenoxy)decanoyl))FI-(D-Glu)-αMeY-LI-Orn-GGPSSGAPPPS-NH₂ | 419 | 5625.3 |
| 410 | Y-Aib-EGT-αMeF(2F)-TSDV-Aib-I-αMeL-LD-Orn-K((2-[2-(2-Amino-ethoxy)-ethoxy]-acetyl)₂-(γ-Glu)-(10-(4-carboxyphenoxy)decanoyl))AQ-Aib-K((2-[2-(2-Amino-ethoxy)-ethoxy]-acetyl)₂-(γ-Glu)-(10-(4-carboxyphenoxy)decanoyl))FI-(D-Glu)-αMeY-LI-Orn-GGPSSGAPPPS-NH₂ | 420 | 5561.25 |
| 411 | Y-Aib-EGT-αMeF(2F)-TSD-4Pal-Aib-I-αMeL-LD-Orn-QAQ-Aib-EFIK((2-[2-(2-Amino-ethoxy)-ethoxy]-acetyl)₂-(γ-Glu)-CO-(CH₂)₁₂-CO₂H)-αMeY-LIK((2-[2-(2-Amino-ethoxy)-ethoxy]-acetyl)₂-(γ-Glu)-CO-(CH₂)₁₂-CO₂H)GGPSSGAPPPS-NH₂ | 421 | 5524.24 |
| 412 | Y-Aib-EGT-αMeF(2F)-TSDY-Aib-I-αMeL-LD-Orn-QAQ-Aib-EFIK((2-[2-(2-Amino-ethoxy)-ethoxy]-acetyl)₂-(γ-Glu)-CO-(CH₂)₁₂-CO₂H)-αMeY-LIK((2-[2-(2-Amino-ethoxy)-ethoxy]-acetyl)₂-(γ-Glu)-CO-(CH₂)₁₂-CO₂H)GGPSSGAPPPS-NH₂ | 422 | 5539.25 |
| 413 | Y-Aib-EGT-αMeF(2F)-TSD-4Pal-Aib-I-αMeL-LD-Orn-K((2-[2-(2-Amino-ethoxy)-ethoxy]-acetyl)₂-(γ-Glu)-CO-(CH₂)₁₀-CH₃)AQ-Aib-K((2-[2-(2-Amino-ethoxy)-ethoxy]-acetyl)₂-(γ-Glu)-CO-(CH₂)₁₀-CH₃)FI-(D-Glu)-αMeY-LI-Orn-GGPSSGAPPPS-NH₂ | 423 | 5394.18 |
| 414 | Y-Aib-EGT-αMeF(2F)-TSD-4Pal-Aib-I-αMeL-LD-Orn-K((2-[2-(2-Amino-ethoxy)-ethoxy]-acetyl)₂-(γ-Glu)-CO-(CH₂)₁₀-CH₃)AQ-Aib-Orn-FI-(D-Glu)-αMeY-LIK((2-[2-(2-Amino-ethoxy)-ethoxy]-acetyl)₂-(γ-Glu)-CO-(CH₂)₁₀-CH₃)GGPSSGAPPPS-NH₂ | 424 | 5394.18 |
| 415 | Y-Aib-EGT-αMeF(2F)-TSDK((2-[2-(2-Amino-ethoxy)-ethoxy]-acetyl)₂-(γ-Glu)-CO-(CH₂)₁₀-CH₃)-Aib-I-αMeL-LD-Orn-K((2-[2-(2-Amino-ethoxy)-ethoxy]-acetyl)₂-(γ-Glu)-CO-(CH₂)₁₀-CH₃)AQ-Aib-4Pal-FI-(D-Glu)-αMeY-LIEGGPSSGAPPPS-NH₂ | 425 | 5409.15 |
| 416 | Y-Aib-EGT-αMeF(2F)-TSD-4Pal-Aib-I-αMeL-LD-Orn-K((2-[2-(2-Amino-ethoxy)-ethoxy]-acetyl)₂-(γ-Glu)-CO-(CH₂)₁₀-CH₃)AQ-Aib-4Pal-FI-(D-Glu)-αMeY-LIK((2-[2-(2-Amino-ethoxy)-ethoxy]-acetyl)₂-(γ-Glu)-CO-(CH₂)₁₀-CH₃)GGPSSGAPPPS-NH₂ | 426 | 5428.2 |
| 417 | Y-Aib-EGT-αMeF(2F)-TSDK((2-[2-(2-Amino-ethoxy)-ethoxy]-acetyl)₂-(γ-Glu)-CO-(CH₂)₁₀-CH₃)-Aib-I-αMeL-LD-Orn-K((2-[2-(2-Amino-ethoxy)-ethoxy]-acetyl)₂-(γ-Glu)-CO-(CH₂)₁₀-CH₃)AQ-Aib-Orn-FI-(D-Glu)-αMeY-LIEGGPSSGAPPPS-NH₂ | 427 | 5375.13 |
| 418 | Y-Aib-EGT-αMeF(2F)-TSD-4Pal-Aib-I-αMeL-LD-Orn-K((2-[2-(2-Amino-ethoxy)-ethoxy]-acetyl)₂-(γ-Glu)-CO-(CH₂)₁₀-CH₃)AQ-Aib-Orn-FI-(D-Glu)-αMeY-LIEGGPSSGAPPPSK((2-[2-(2-Amino-ethoxy)-ethoxy]-acetyl)₂-(γ-Glu)-CO-(CH₂)₁₀-CH₃)-NH₂ | 428 | 5523.3 |
| 419 | Y-Aib-EGT-αMeF(2F)-TSD-4Pal-Aib-I-αMeL-LD-Orn-K((2-[2-(2-Amino-ethoxy)-ethoxy]-acetyl)₂-(γ-Glu)-CO-(CH₂)₁₀-CH₃)AQ-Aib-TFI-(D-Glu)-αMeY-LIK((2-[2-(2-Amino-ethoxy)-ethoxy]-acetyl)₂-(γ-Glu)-CO-(CH₂)₁₀-CH₃)GGPSSGAPPPS-NH₂ | 429 | 5381.14 |
| 420 | Y-Aib-EGT-αMeF(2F)-TSD-4Pal-Aib-I-αMeL-LD-Orn-K((2-[2-(2-Amino-ethoxy)-ethoxy]-acetyl)₂-(γ-Glu)-CO-(CH₂)₁₀-CH₃)AQ-Aib-4Pal-FI-(D-Glu)-αMeY-LIEGGPSSGAPPPSK((2-[2-(2-Amino-ethoxy)-ethoxyl-acetyl)₂-(γ-Glu)-CO-(CH₂)₁₀-CH₃)-NH₂ | 430 | 5557.31 |
| 421 | Y-Aib-EGT-αMeF(2F)-TSDK((2-[2-(2-Amino-ethoxy)-ethoxy]-acetyl)₃-(γ-Glu)-CO-(CH₂)₁₀-CH₃)-Aib-I-αMeL-LD-Orn-K((2-[2-(2-Amino-ethoxy)-ethoxy]-acetyl)₃-(γ-Glu)-CO-(CH₂)₁₀-CH₃)AQ-Aib-EFI-(D-Glu)-αMeY-LIEGGPSSGAPPPS-NH₂ | 431 | 5680.42 |
| 422 | Y-Aib-EGT-αMeF(2F)-TSD-4Pal-Aib-I-αMeL-LD-Orn-K((2-[2-(2-Amino-ethoxy)-ethoxy]-acetyl)₃-(γ-Glu)-CO-(CH₂)₁₀-CH₃)AQ-Aib-K((2-[2-(2-Amino-ethoxy)-ethoxy]-acetyl)₃-(γ-Glu)-CO-(CH₂)₁₀-CH₃)FI-(D-Glu)-αMeY-LIEGGPSSGAPPPS-NH₂ | 432 | 5699.46 |
| 423 | Y-Aib-EGT-αMeF(2F)-TSD-4Pal-Aib-I-αMeL-LD-Orn-K((2-[2-(2-Amino-ethoxy)-ethoxy]-acetyl)₃-(γ-Glu)-CO-(CH₂)₁₀-CH₃)AQ-Aib-EFI-(D-Glu)-αMeY-LIK((2-[2-(2-Amino-ethoxy)-ethoxy]-acetyl)₃-(γ-Glu)-CO-(CH₂)₁₀-CH₃)GGPSSGAPPPS-NH₂ | 433 | 5699.46 |
| 424 | Y-Aib-EGT-αMeF(2F)-TSD-4Pal-Aib-I-αMeL-LD-Orn-K((2-[2-(2-Amino-ethoxy)-ethoxy]-acetyl)₃-(γ-Glu)-CO-(CH₂)₁₀-CH₃)AQ-Aib-EFI-(D-Glu)-αMeY-LIEGGPSSGAPPPSK((2-[2-(2-Amino-ethoxy)-ethoxy]-acetyl)₃-(γ-Glu)-CO-(CH₂)₁₀-CH₃)-NH₂ | 434 | 5828.58 |
| 425 | Y-Aib-EGT-αMeF(2F)-TSDK((2-[2-(2-Amino-ethoxy)-ethoxy]-acetyl)-(γ-Glu)-CO-(CH₂)₁₀-CH₃)-Aib-I-αMeL-LD-Orn-K((2-[2-(2-Amino-ethoxy)-ethoxy]-acetyl)-(γ-Glu)-CO-(CH₂)₁₀-CH₃)AQ-Aib-EFI-(D-Glu)-αMeY-LIEGGPSSGAPPPS-NH₂ | 435 | 5099.79 |
| 426 | Y-Aib-EGT-αMeF(2F)-TSD-4Pal-Aib-I-αMeL-LD-Orn-K((2-[2-(2-Amino-ethoxy)-ethoxy]-acetyl)-(γ-Glu)-CO-(CH₂)₁₀-CH₃)AQ-Aib-K((2-[2-(2-Amino-ethoxy)-ethoxy]-acetyl)-(γ-Glu)-CO-(CH₂)₁₀-CH₃)FI-(D-Glu)-αMeY-LIEGGPSSGAPPPS-NH₂ | 436 | 5118.84 |
| 427 | Y-Aib-EGT-αMeF(2F)-TSD-4Pal-Aib-I-αMeL-LD-Orn-K((2-[2-(2-Amino-ethoxy)-ethoxy]-acetyl)-(γ-Glu)-CO-(CH₂)₁₀-CH₃)AQ-Aib-EFI-(D-Glu)-αMeY-LIK((2-[2-(2-Amino-ethoxy)-ethoxy]-acetyl)-(γ-Glu)-CO-(CH₂)₁₀-CH₃)GGPSSGAPPPS-NH₂ | 437 | 5118.84 |
| 428 | Y-Aib-EGT-αMeF(2F)-TSD-4Pal-Aib-I-αMeL-LD-Orn-K((2-[2-(2-Amino-ethoxy)-ethoxy]-acetyl)-(γ-Glu)-CO-(CH₂)₁₀-CH₃)AQ-Aib-EFI-(D-Glu)-αMeY-LIEGGPSSGAPPPSK((2-[2-(2-Amino-ethoxy)-ethoxy]-acetyl)-(γ-Glu)-CO-(CH₂)₁₀-CH₃)-NH₂ | 438 | 5247.95 |
| 429 | Y-Aib-EGT-αMeF(2F)-TSDK((2-[2-(2-Amino-ethoxy)-ethoxy]-acetyl)₂-(γ-Glu)-CO-(CH₂)₁₀-CH₃)-Aib-I-αMeL-LD-Orn-K((2-[2-(2-Amino-ethoxy)-ethoxy]-acetyl)₂-(γ-Glu)-CO-(CH₂)₁₀-CH₃)AQ-Aib-E-αMeF-I-(D-Glu)-αMeY-LIEGGPSSGAPPPS-NH₂ | 439 | 5404.13 |
| 430 | Y-Aib-EGT-αMeF(2F)-TSD-4Pal-Aib-I-αMeL-LD-Orn-K((2-[2-(2-Amino-ethoxy)-ethoxy]-acetyl)₂-(γ Glu)-CO-(CH₂)₁₀H₃)AQ-Aib-K((2-[2-(2-Amino-ethoxy)-ethoxy]-acetyl)₂-(γGlu)-CO-(CH₂)₁₀C₃)-αMeFI-(D-Glu)-αMeY-LIEGGPSSGAPPPS-NH₂ | 440 | 5423.18 |
| 431 | Y-Aib-EGT-αMeF(2F)-TSD-4Pal-Aib-I-αMeL-LD-Orn-K((2-[2-(2-Amino-ethoxy)-ethoxy]-acetyl)₂-(γ Glu)-CO-(CH₂)₁₀C₃)AQ-Aib-E-αMeF-I-(D-Glu)-αMeY-LIEGGPSSGAPPPSK((2-[2-(2-Amino-ethoxy)-ethoxy]-acetyl)₂-(γ-Glu)-CO-(CH₂)₁₀-CH₃)-NH₂ | 441 | 5552.29 |
| 432 | Y-Aib-EGT-αMeF(2F)-TSDK((2-[2-(2-Amino-ethoxy)-ethoxy]-acetyl)₃-(γ-Glu)-CO-(CH₂)₁₀-CH₃)-Aib-I-αMeL-LD-Orn-K((2-[2-(2-Amino-ethoxy)-ethoxy]-acetyl)₃-(γ-Glu)-CO-(CH₂)₁₀-CH₃)AQ-Aib-Orn-FI-(D-Glu)-αMeY-LIEGGPSSGAPPPS-NH₂ | 442 | 5665.45 |
| 433 | Y-Aib-EGT-αMeF(2F)-TSD-4Pal-Aib-I-αMeL-LD-Orn-K((2-[2-(2-Amino-ethoxy)-ethoxy]-acetyl)₃-(γ-Glu)-CO-(CH₂)₁₀-CH₃)AQ-Aib-K((2-[2-(2-Amino-ethoxy)-ethoxy]-acetyl)₃-(γ-Glu)-CO-(CH₂)₁₀-CH₃)FI-(D-Glu)-αMeY-LI-Orn-GGPSSGAPPPS-NH₂ | 443 | 5599.39 |
| 434 | Y-Aib-EGT-αMeF(2F)-TSD-4Pal-Aib-I-αMeL-LD-Orn-K((2-[2-(2-Amino-ethoxy)-ethoxy]-acetyl)₃-(γ-Glu)-CO-(CH₂)₁₀-CH₃)AQ-Aib-Orn-FI-(D-Glu)-αMeY-LIK((2-[2-(2-Amino-ethoxy)-ethoxy]-acetyl)₃-(γ-Glu)-CO-(CH₂)₁₀-CH₃)GGPSSGAPPPS-NH₂ | 444 | 5684.5 |
| 435 | Y-Aib-EGT-αMeF(2F)-TSD-4Pal-Aib-I-αMeL-LD-Orn-K((2-[2-(2-Amino-ethoxy)-ethoxy]-acetyl)₃-(γ Glu)-CO-(CH₂)₁₀CH₃)AQ-Aib-Orn-FI-(D-Glu)-αMeY-LIEGGPSSGAPPPSK((2-[2-(2-Amino-ethoxy)-ethoxy]-acetyl)₃-(γ-Glu)-CO-(CH₂)₁₀-CH₃)-NH₂ | 445 | 5813.61 |
| 436 | Y-Aib-EGT-αMeF(2F)-TSDK((2-[2-(2-Amino-ethoxy)-ethoxy]-acetyl)₃-(γ-Glu)-CO-(CH₂)₁₀-CH₃)-Aib-I-αMeL-LD-Orn-K((2-[2-(2-Amino-ethoxy)-ethoxy]-acetyl)₃-(γ-Glu)-CO-(CH₂)₁₀-CH₃)AQ-Aib-E-αMeF-I-(D-Glu)-αMeY-LIEGGPSSGAPPPS-NH₂ | 446 | 5694.44 |
| 437 | Y-Aib-EGT-αMeF(2F)-TSD-4Pal-Aib-I-αMeL-LD-Orn-K((2-[2-(2-Amino-ethoxy)-ethoxy]-acetyl)₃-(γ-Glu)-CO-(CH₂)₁₀-CH₃)AQ-Aib-K((2-[2-(2-Amino-ethoxy)-ethoxy]-acetyl)₃-(γ-Glu)-CO-(CH₂)₁₀-CH₃)-αMeF-I-(D-Glu)-αMeY-LIEGGPSSGAPPPS-NH₂ | 447 | 5729.53 |
| 438 | Y-Aib-EGT-αMeF(2F)-TSD-4Pal-Aib-I-αMeL-LD-Orn-K((2-[2-(2-Amino-ethoxy)-ethoxy]-acetyl)₃-(γ-Glu)-CO-(CH₂)₁₀-CH₃)AQ-Aib-E-αMeF-I-(D-Glu)-αMeY-LIK((2-[2-(2-Amino-ethoxy)-ethoxy]-acetyl)₃-(γ-Glu)-CO-(CH2)₁₀-CH₃)GGPSSGAPPPS-NH₂ | 448 | 5713.49 |
| 439 | Y-Aib-EGT-αMeF(2F)-TSD-4Pal-Aib-I-αMeL-LD-Orn-K((2-[2-(2-Amino-ethoxy)-ethoxy]-acetyl)₃-(_{Y}-Glu)-CO-(CH₂)₁₀-CH₃)AQ-Aib-E-αMeF-I-(D-Glu)-αMeY-LIEGGPSSGAPPPSK((2-[2-(2-Amino-ethoxy)-ethoxy]-acetyl)₃-(γ-Glu)-CO-(CH₂)₁₀-CH₃)-NH₂ | 449 | 5842.6 |
| 440 | Y-Aib-EGT-αMeF(2F)-TSD-4Pal-Aib-I-αMeL-LD-Orn-QAQ-Aib-Orn-FIK((2-[2-(2-Amino-ethoxy)-ethoxy]-acetyl)₂-(γ-Glu)-(10-(4-carboxyphenoxy)decanoyl))-αMeY-LIK((2-[2-(2-Amino-ethoxy)-ethoxy]-acetyl)₂-(γ-Glu)-(10-(4-carboxyphenoxy)decanoyl))GGPSSGAPPPS-NH₂ | 450 | 5609.3 |
| 441 | Y-Aib-EGT-αMeF(2F)-TSD-4Pal-Aib-G-αMeL-LD-Orn-QAQ-Aib-Orn-FIK((2-[2-(2-Amino-ethoxy)-ethoxy]-acetyl)₂-(γ-Glu)-CO-(CH₂)₁₂-CO₂H)-αMeY-LIK((2-[2-(2-Amino-ethoxy)-ethoxy]-acetyl)₂-(γ-Glu)-CO-(CH₂)₁₂-CO₂H)GGPSSGAPPPS-NH₂ | 451 | 5453.16 |
| 442 | Y-Aib-EGT-αMeF(2F)-TSD-4Pal-Aib-I-αMeL-LD-Orn-QAQ-Aib-Orn-FIK((2-[2-(2-Amino-ethoxy)-ethoxy]-acetyl)₂-(γ-Glu)-(11-(4-carboxyphenoxy)undecanoyl)-αMeY-LIK((2-[2-(2-Amino-ethoxy)-ethoxy]-acetyl)₂-(γ-Glu)-(11-(4-carboxyphenoxy)undecanoyl)GGPSSGAPPPS-NH₂ | 452 | 5637.35 |
| 443 | Y-Aib-EGT-αMeF(2F)-TSD-4Pal-Aib-I-αMeL-LD-Orn-QAQ-Aib-Orn-FIK((2-[2-(2-Amino-ethoxy)-ethoxy]-acetyl)₂-(γ-Glu)-CO-(CH₂)₁₄-CO₂)-αMeY-LIK((2-[2-(2-Amino-ethoxy)-ethoxy]-acetyl)₂-(γ-Glu)-CO-(CH₂)₁₄-CO₂)GGPSSGAPPPS-NH₂ | 453 | 5565.38 |
| 444 | Y-Aib-EGT-αMeF(2F)-TSD-4Pal-Aib-I-αMeL-LD-Orn-QAQ-Aib-4Pal-FIK((2-[2-(2-Amino-ethoxy)-ethoxy]-acetyl)₂-(γ-Glu)-CO-(CH₂)₁₂-CO₂H)-αMeY-LIK((2-[2-(2-Amino-ethoxy)-ethoxy]-acetyl)₂-(γ-Glu)-CO-(CH₂)₁₂-CO₂H)GGPSSGAPPPS-NH₂ | 454 | 5543.29 |
| 445 | Y-Aib-EGT-αMeF(2F)-TSDK((2-[2-(2-Amino-ethoxy)-ethoxy]-acetyl)₂-(γ-Glu)-CO-(CH₂)₁₀-CH₃)-Aib-I-αMeL-LDGK((2-[2-(2-Amino-ethoxy)-ethoxy]-acetyl)₂-(γ-Glu)-CO-(CH₂)₁₀-CH₃)AQ-Aib-EFI-(D-Glu)-αMeY-LIEGGPSSGAPPPS-NH₂ | 455 | 5333.01 |
| 446 | Y-Aib-EGT-αMeF(2F)-TSDV-Aib-I-αMeL-LD-Orn QAQ-Aib-EFIK((2-[2-(2-Amino-ethoxy)-ethoxy]-acetyl)₂-(γ-Glu)-(10-(4-carboxyphenoxy)decanoyl))-αMeY-LIK((2-[2-(2-Amino-ethoxy)-ethoxy]-acetyl)₂-γ-Glu)-(10-(4-carboxyphenoxy)decanoyl))GGPSSGAPPPS-NH₂ | 456 | 5575.24 |
| 447 | Y-Aib-EGT-αMeF(2F)-TSDV-Aib-I-αMeL-LD-Orn-QAQ-Aib-Orn-FIK((2-[2-(2-Amino-ethoxy)-ethoxy]-acetyl)₂-(γ-Glu)-(10-(4-carboxyphenoxy)decanoyl))-αMeY-LIK((2-[2-(2-Amino-ethoxy)-ethoxy]-acetyl)₂-(γ-Glu)-(10-(4-carboxyphenoxy)decanoyl))GGPSSGAPPPS-NH₂ | 457 | 5560.27 |
| 448 | Y-Aib-EGT-αMeF(2F)-TSDV-Aib-I-αMeL-LD-Orn QAQ-Aib-Orn-FIK((2-[2-(2-Amino-ethoxy)-ethoxy]-acetyl)₂-(γ-Glu)-CO-(CH₂)₁₂-CO₂H)-αMeY-LIK((2-[2-(2-Amino-ethoxy)-ethoxy]-acetyl)₂-(γ-Glu)-CO-(CH₂)₁₂-CO₂H)GGPSSGAPPPS-NH₂ | 458 | 5460.24 |
| 449 | Y-Aib-EGT-αMeF(2F)-TSD-4Pal-Aib-I-αMeL-LD-Orn-QAQ-Aib-Orn-FIK((2-[2-(2-Amino-ethoxy)-ethoxy]-acetyl)-Ahx-(γ-Glu)-CO-(CH₂)₁₂-CO₂)-αMeY-LIK((2-[2-(2-Amino-ethoxy)-ethoxy]-acetyl)-Ahx-(γ-Glu)-CO-(CH₂)₁₂-CO₂)GGPSSGAPPPS-NH₂ | 459 | 5445.27 |
| 450 | Y-Aib-EGT-αMeF(2F)-TSD-4Pal-Aib-I-αMeL-LD-Orn-QAQ-Aib-Orn-FIK((2-[2-(2-Amino-ethoxy)-ethoxy]-acetyl)-Aoc-(γ-Glu)-CO-(CH₂)₁₂-CO₂)-αMeY-LIK((2-[2-(2-Amino-ethoxy)-ethoxy]-acetyl)-Aoc-(γ-Glu)-CO-(CH₂)₁₂-CO₂)GGPSSGAPPPS-NH₂ | 460 | 5501.38 |
| 451 | Y-Aib-EGT-αMeF(2F)-TSD-4Pal-Aib-I-αMeL-LD-Orn-QAQ-Aib-Orn-FIK(Ahx-(2-[2-(2-Amino-ethoxy)-ethoxy]-acetyl)-(γ-Glu)-CO-(CH₂)₁₂-CO₂)-αMeY-LIK(Ahx-(2-[2-(2-Amino-ethoxy)-ethoxy]-acetyl)-(γ-Glu)-CO-(CH₂)₁₂-CO₂)GGPSSGAPPPS-NH₂ | 461 | 5445.27 |
| 452 | Y-Aib-EGT-αMeF(2F)-TSD-4Pal-Aib-I-αMeL-LD-Orn-QAQ-Aib-Orn-FIK(Aoc-(2-[2-(2-Amino-ethoxy)-ethoxy]-acetyl)-(γ-Glu)-CO-(CH₂)₁₂-CO₂)-αMeY-LIK(Aoc-(2-[2-(2-Amino-ethoxy)-ethoxy]-acetyl)-(γ-Glu)-CO-(CH₂)₁₂-CO₂)GGPSSGAPPPS-NH₂ | 462 | 5501.38 |
| 453 | Y-Aib-EGT-αMeF(2F)-TSD-4Pal-Aib-I-αMeL-LD-Orn-QAQ-Aib-Orn-FIK((2-[2-(2-Amino-ethoxy)-ethoxy]-acetyl)-Ahx-(γ-Glu)-(10-(4-carboxyphenoxy)decanoyl))-αMeY-LIK((2-[2-(2-Amino-ethoxy)-ethoxy]-acetyl)-Ahx-(γ-Glu)-(10-(4-carboxyphenoxy)decanoyl))GGPSSGAPPPS-NH₂ | 463 | 5545.3 |
| 454 | Y-Aib-EGT-αMeF(2F)-TSD-4Pal-Aib-I-αMeL-LD-Orn-QAQ-Aib-Orn-FIK((2-[2-(2-Amino-ethoxy)-ethoxy]10-(4-carboxyphenoxy)decanoyl))-αMeY-LIK((2-[2-(2-Amino-ethoxy)-ethoxy]-acetyl)-Aoc-(γ-Glu)-(10-(4-carboxyphenoxy)decanoyl))GGPSSGAPPPS-NH₂ | 464 | 5601.41 |
| 455 | Y-Aib-EGT-αMeF(2F)-TSD-4Pal-Aib-I-αMeL-LD-Orn-QAQ-Aib-Orn-FIK(Ahx-(2-[2-(2-Amino-ethoxy)-ethoxy]-acetyl)-(γ-Glu)-(10-(4-carboxyphenoxy)decanoyl))-αMeY-LIK(Ahx-(2-[2-(2-Amino-ethoxy)-ethoxy]-acetyl)-(γ-Glu)-(10-(4-carboxyphenoxy)decanoyl))GGPSSGAPPPS-NH₂ | 465 | 5545.3 |
| 456 | Y-Aib-EGT-αMeF(2F)-TSD-4Pal-Aib-I-αMeL-LD-Orn-QAQ-Aib-Orn-FIK(Aoc-(2-[2-(2-Amino-ethoxy)-ethoxy]-acetyl)-(γ-Glu)-(10-(4-carboxyphenoxy)decanoyl))-αMeY-LIK(Aoc-(2-[2-(2-Amino-ethoxy)-ethoxy]-acetyl)-(γ-Glu)-(10-(4-carboxyphenoxy)decanoyl))GGPSSGAPPPS-NH₂ | 466 | 5601.41 |
| 457 | Y-Aib-EGT-αMeF(2F)-TSD-4Pal-Aib-I-αMeL-LD-Orn-QAQ-Aib-Orn-FIK(PEG4-(γ-Glu)-CO-(CH₂)₁₂-CO₂H)-αMeY-LIK(PEG4-(γ-Glu)-CO-(CH₂)₁₂-CO₂H)GGPSSGAPPPS-NH₂ | 467 | 5423.22 |
| 458 | Y-Aib-EGT-αMeF(2F)-TSD-4Pal-Aib-I-αMeL-LD-Orn-QAQ-Aib-Orn-FIK(PEG3-(γ-Glu)-CO-(CH₂)₁₂-CO₂H)-αMeY-LIK(PEG3-(γ-Glu)-CO-(CH₂)₁₂-CO₂H)GGPSSGAPPPS-NH₂ | 468 | 5335.11 |
| 459 | Y-Aib-EGT-αMeF(2F)-TSD-4Pal-Aib-I-αMeL-LD-Orn-QAQ-Aib-Orn-FIK((2-[2-(2-Amino-ethoxy)-ethoxy]-acetyl)-(γ-Glu)-CO-(CH₂)₁₂-CO₂H)-αMeY-LIK((2-[2-(2-Amino-ethoxy)-ethoxy]-acetyl)-(γ-Glu)-CO-(CH₂)₁₂-CO₂H)GGPSSGAPPPS-NH₂ | 469 | 5218.96 |
| 460 | Y-Aib-EGT-αMeF(2F)-TSD-4Pal-Aib-I-αMeL-LD-Orn-QAQ-Aib-EFIK((2-[2-(2-Amino-ethoxy)-ethoxy]-acetyl)₃-(γ-Glu)-CO-(CH₂)₁₂-CO₂H)-αMeY-LIK((2-[2-(2-Amino-ethoxy)-ethoxy]-acetyl)₃-(γ-Glu)-CO-(CH₂)₁₂-CO₂H)GGPSSGAPPPS-NH₂ | 470 | 5814.55 |
| 461 | Y-Aib-EGT-αMeF(2F)-TSD-4Pal-Aib-I-αMeL-LD-Orn-QAQ-Aib-Orn-FIK(PEG4-(γ-Glu)-(10-(4-carboxyphenoxy)decanoyl))-αMeY-LIK(PEG4-(γ-Glu)-(10-(4-carboxyphenoxy)decanoyl))GGPSSGAPPPS-NH₂ | 471 | 5523.25 |
| 462 | Y-Aib-EGT-αMeF(2F)-TSD-4Pal-Aib-I-αMeL-LD-Orn-QAQ-Aib-Orn-FIK(PEG3-(γ-Glu)-(10-(4-carboxyphenoxy)decanoyl))-αMeY-LIK(PEG3-(γ-Glu)-(10-(4-carboxyphenoxy)decanoyl))GGPSSGAPPPS-NH₂ | 472 | 5435.15 |
| 463 | Y-Aib-EGT-αMeF(2F)-TSD-4Pal-Aib-I-αMeL-LD-Orn-QAQ-Aib-Orn-FIK((2-[2-(2-Amino-ethoxy)-ethoxy]-acetyl)-(γ-Glu)-(10-(4-carboxyphenoxy)decanoyl))-αMeY-LIK((2-[2-(2-Amino-ethoxy)-ethoxy]-acetyl)-(γ-Glu)-(10-(4-carboxyphenoxy)decanoyl))GGPSSGAPPPS-NH₂ | 473 | 5318.99 |
| 464 | Y-Aib-EGT-αMeF(2F)-TSD-4Pal-Aib-I-αMeL-LD-Orn-QAQ-Aib-EFIK((2-[2-(2-Amino-ethoxy)-ethoxy]-acetyl)₃-(γ-Glu)-(10-(4-carboxyphenoxy)decanoyl)-αMeY-LIK((2-[2-(2-Amino-ethoxy)-ethoxy]-acetyl)₃-(γ-Glu)-(10-(4-carboxyphenoxy)decanoyl)GGPSSGAPPPS-NH₂ | 474 | 5914.58 |
| 465 | Y-Aib-EGT-αMeF(2F)-TSD-4Pal-Aib-I-αMeL-LD-Orn-K(((2-[2-(2-Amino-ethoxy)-ethoxy]-acetyl)-Aoc-CO-(CH₂)₁₂-CO₂H)AQ-Aib-EFI-(D-Glu)-αMeY-LIK(((2-[2-(2-Amino-ethoxy)-ethoxy]-acetyl)-Aoc-CO-(CH₂)₁₂-CO₂H)GGPSSGAPPPS-NH₂ | 475 | 5259.1 |
| 466 | Y-Aib-EGT-αMeF(2F)-TSD-4Pal-Aib-I-αMeL-LD-Orn-QAQ-Aib-Orn-FIK(PEG6-(γ-Glu)-CO-(CH₂)₁₂-CO₂H)-αMeY-LIK(PEG6-(γ-Glu)-CO-(CH₂)₁₂-CO₂H)GGPSSGAPPPS-NH₂ | 476 | 5599.43 |
| 467 | Y-Aib-EGT-αMeF(2F)-TSD-4Pal-Aib-I-αMeL-LD-Orn-QAQ-Aib-Orn-FIK(PEG5-(γ-Glu)-CO-(CH₂)₁₂-CO₂H)-αMeY-LIK(PEG5-(γ-Glu)-CO-(CH₂)₁₂-CO₂H)GGPSSGAPPPS-NH₂ | 477 | 5511.33 |
| 468 | Y-Aib-EGT-αMeF(2F)-TSD-4Pal-Aib-I-αMeL-LD-Orn-QAQ-Aib-Orn-FIK(PEG6-(γ-Glu)-(10-(4-carboxyphenoxy)decanoyl))-αMeY-LIK(PEG6-(γ-Glu)-(10-(4-carboxyphenoxy)decanoyl))GGPSSGAPPPS-NH₂ | 478 | 5699.46 |
| 469 | Y-Aib-EGT-αMeF(2F)-TSD-4Pal-Aib-I-αMeL-LD-Orn-QAQ-Aib-Orn-FIK(PEG5-(γ-Glu)-(10-(4-carboxyphenoxy)decanoyl))-αMeY-LIK(PEG5-(γ-Glu)-(10-(4-carboxyphenoxy)decanoyl))GGPSSGAPPPS-NH₂ | 479 | 5611.36 |
| 470 | Y-Aib-EGT-αMeF(2F)-TSD-4Pal-Aib-I-αMeL-LD-Orn-QAQ-Aib-Orn-FIK(((2-[2-(2-Amino-ethoxy)-ethoxy]-acetyl)₂--Trx-(γ-Glu)-CO-(CH₂)₁₂-CO₂H)-αMeY-LIK(((2-[2-(2-Amino-ethoxy)-ethoxy]-acetyl)₂--Trx(γ-Glu)-CO-(CH₂)₁₂-CO₂H)GGPSSGAPPPS-NH₂ | 480 | 5787.66 |
| 471 | Y-Aib-EGT-αMeF(2F)-TSD-4Pal-Aib-I-αMeL-LD-Orn-QAQ-Aib-Orn-FIK(((2-[2-(2-Amino-ethoxy)-ethoxy]-acetyl)₂--Trx-(γ-Glu)-(10-(4-carboxyphenoxy)decanoyl))-αMeY-LIK(((2-[2-(2-Amino-ethoxy)-ethoxy]-acetyl)₂--Trx-(γ-Glu)-(10-(4-carboxyphenoxy)decanoyl))GGPSSGAPPPS-NH₂ | 481 | 5887.69 |
| 472 | Y-Aib-EGT-αMeF(2F)-TSD-4Pal-Aib-I-αMeL-LD-Orn-QAQ-Aib-Orn-FIK(((2-[2-(2-Amino-ethoxy)-ethoxy]-acetyl)-Trx-(γ-Glu)-CO-(CH₂)₁₂-CO₂H)-αMeY-LIK(((2-[2-(2-Amino-ethoxy)-ethoxy]-acetyl)-Trx-(γ-Glu)-CO-(CH₂)₁₂-CO₂H)GGPSSGAPPPS-NH₂ | 482 | 5497.35 |
| 473 | Y-Aib-EGT-αMeF(2F)-TSD-4Pal-Aib-I-αMeL-LD-Orn-QAQ-Aib-Orn-FIK(((2-[2-(2-Amino-ethoxy)-ethoxy]-acetyl)-Trx-(γ-Glu)-(10-(4-carboxyphenoxy)decanoyl))-αMeY-LIK(((2-[2-(2-Amino-ethoxy)-ethoxy]-acetyl)-Trx-(γ-Glu)-(10-(4-carboxyphenoxy)decanoyl))GGPSSGAPPPS-NH₂ | 483 | 5597.38 |
| 474 | Y-Aib-EGT-αMeF(2F)-TSD-4Pal-Aib-I-αMeL-LD-Orn-QAQ-Aib-Orn-FIK((2-[2-(2-Amino-ethoxy)-ethoxy]-acetyl)₂-(γ-Glu)₂-CO-(CH₂)₁₂-CO₂H)-αMeY-LIK((2-[2-(2-Amino-ethoxy)-ethoxy]-acetyl)₂-(γ-Glu)₂-CO-(CH₂)₁₂-CO₂H)GGPSSGAPPPS-NH₂ | 484 | 5767.5 |
| 475 | Y-Aib-EGT-αMeF(2F)-TSD-4Pal-Aib-I-αMeL-LD-Orn-QAQ-Aib-Orn-FIK((2-[2-(2-Amino-ethoxy)-ethoxy]-acetyl)₂-(γ-Glu)₂--(10-(4-carboxyphenoxy)decanoyl))-αMeY-LIK((2-[2-(2-Amino-ethoxy)-ethoxy]-acetyl)₂-(γ-Glu)₂--(10-(4-carboxyphenoxy)decanoyl))GGPSSGAPPPS-NH₂ | 485 | 5867.53 |
| 476 | Y-Aib-EGT-αMeF(2F)-TSD-4Pal-Aib-I-αMeL-LD-Orn-QAQ-Aib-Orn-FIK((2-[2-(2-Amino-ethoxy)-ethoxy]-acetyl)₃-(γ-Glu)-CO-(CH₂)₁₂-CO₂H)-αMeY-LIK((2-[2-(2-Amino-ethoxy)-ethoxy]-acetyl)₃-(γ-Glu)-CO-(CH₂)₁₂-CO₂H)GGPSSGAPPPS-NH₂ | 486 | 5799.58 |
| 477 | Y-Aib-EGT-αMeF(2F)-TSD-4Pal-Aib-I-αMeL-LD-Orn-QAQ-Aib-Orn-FIK((2-[2-(2-Amino-ethoxy)-ethoxy]-acetyl)₃-(γ-Glu)--(10-(4-carboxyphenoxy)decanoyl))-αMeY-LIK((2-[2-(2-Amino-ethoxy)-ethoxy]-acetyl)₃-(γ-Glu)--(10-(4-carboxyphenoxy)decanoyl))GGPSSGAPPPS-NH₂ | 487 | 5899.61 |
| 478 | Y-Aib-EGT-αMeF(2F)-TSDY-Aib-I-αMeL-LD-Orn-IAQ-Aib-Orn-FIK((2-[2-(2-Amino-ethoxy)-ethoxy]-acetyl)₃-(γ-Glu)-CO-(CH₂)₁₂-CO₂H)-αMeY-LIK((2-[2-(2-Amino-ethoxy)-ethoxy]-acetyl)₃-(γ-Glu)-CO-(CH₂)₁₂-CO₂H)GGPSSGAPPPS-NH₂ | 488 | 5799.62 |
| 479 | Y-Aib-EGT-αMeF(2F)-TSDY-Aib-I-αMeL-LD-Orn-QAQ-Aib-Orn-FIK((2-[2-(2-Amino-ethoxy)-ethoxy]-acetyl)₃-(γ-Glu)-CO-(CH₂)₁₂-CO₂H)-αMeY-LIK((2-[2-(2-Amino-ethoxy)-ethoxy]-acetyl)₃-(γ-Glu)-CO-(CH₂)₁₂-CO₂H)GGPSSGAPPPS-NH₂ | 489 | 5814.59 |
| 480 | Y-Aib-EGT-αMeF(2F)-TSDY-Aib-I-αMeL-LD-Orn-QAQ-Aib-Orn-FIK((2-[2-(2-Amino-ethoxy)-ethoxy]-acetyl)₂-(γ-Glu)₂-CO-(CH₂)₁₂-CO₂H)-αMeY-LIK((2-[2-(2-Amino-ethoxy)-ethoxy]-acetyl)₂-(γ-Glu)₂-CO-(CH₂)₁₂-CO₂H)GGPSSGAPPPS-NH₂ | 490 | 5782.51 |
| 481 | Y-Aib-EGT-αMeF(2F)-TSDY-Aib-I-αMeL-LD-Orn-IAQ-Aib-Orn-FIK((2-[2-(2-Amino-ethoxy)-ethoxy]-acetyl)₃-(γ-Glu)--(10-(4-carboxyphenoxy)decanoyl))-αMeY-LIK((2-[2-(2-Amino-ethoxy)-ethoxy]-acetyl)₃-(γ-Glu)--(10-(4-carboxyphenoxy)decanoyl))GGPSSGAPPPS-NH₂ | 491 | 5899.65 |
| 482 | Y-Aib-EGT-αMeF(2F)-TSD-4Pal-Aib-I-αMeL-LD-Orn-QAQ-Aib-Orn-FIK((γ-Glu)-(2-[2-(2-Amino-ethoxy)-ethoxy]-acetyl)₂-(γ-Glu)-CO-(CH₂)₁₂-CO₂H)-αMeY-LIK((γ-Glu)-(2-[2-(2-Amino-ethoxy)-ethoxy]-acetyl)₂-(γ-Glu)-CO-(CH₂)₁₂-CO₂H)GGPSSGAPPPS-NH₂ | 492 | 5767.5 |
| 483 | Y-Aib-EGT-αMeF(2F)-TSD-4Pal-Aib-I-αMeL-LD-Orn-QAQ-Aib-Orn-FIK((γ-Glu)-(2-[2-(2-Amino-ethoxy)-ethoxy]-acetyl)₂-(γ-Glu)-(10-(4-carboxyphenoxy)decanoyl))-αMeY-LIK((γ-Glu)-(2-[2-(2-Amino-ethoxy)-ethoxy]-acetyl)₂-(γ-Glu)-(10-(4-carboxyphenoxy)decanoyl))GGPSSGAPPPS-NH₂ | 493 | 5867.53 |
| 484 | Y-Aib-EGT-αMeF(2F)-TSD-4Pal-Aib-I-αMeL-LD-Orn-QAQ-Aib-Orn-FIK((2-[2-(2-Amino-ethoxy)-ethoxy]-acetyl)-(γ-Glu)-(2-[2-(2-Amino-ethoxy)-ethoxy]-acetyl)-(γ-Glu)-CO-(CH₂)₁₂-CO₂H)-αMeY-LIK((2-[2-(2-Amino-ethoxy)-ethoxy]-acetyl)-(γ-Glu)-(2-[2-(2-Amino-ethoxy)-ethoxy]-acetyl)-(γ-Glu)-CO-(CH₂)₁₂-CO₂H)GGPSSGAPPPS-NH₂ | 494 | 5767.5 |
| 485 | Y-Aib-EGT-αMeF(2F)-TSD-4Pal-Aib-I-αMeL-LD-Orn-QAQ-Aib-Orn-FIK((2-[2-(2-Amino-ethoxy)-ethoxy]-acetyl)-(γ-Glu)-(2-[2-(2-Amino-ethoxy)-ethoxy]-acetyl)-(γ-Glu)-(10-(4-carboxyphenoxy)decanoyl))-αMeY-LIK((2-[2-(2-Amino-ethoxy)-ethoxy]-acetyl)-(γ-Glu)-(2-[2-(2-Amino-ethoxy)-ethoxy]-acetyl)-(γ-Glu)-(10-(4-carboxyphenoxy)decanoyl))GGPSSGAPPPS-NH₂ | 495 | 5867.53 |
| 486 | Y-Aib-EGT-αMeF(2F)-TSD-4Pal-Aib-I-αMeL-LD-Orn-QAQ-Aib-Orn-FIK((2-[2-(2-Amino-ethoxy)-ethoxy]-acetyl)-(γ-Glu)₃-CO-(CH₂)₁₂-CO₂H)-αMeY-LIK((2-[2-(2-Amino-ethoxy)-ethoxy]-acetyl)-(γ-Glu)₃-CO-(CH₂)₁₂-CO₂H)GGPSSGAPPPS-NH₂ | 496 | 5735.41 |
| 487 | Y-Aib-EGT-αMeF(2F)-TSD-4Pal-Aib-I-αMeL-LD-Orn-QAQ-Aib-Orn-FIK((2-[2-(2-Amino-ethoxy)-ethoxy]-acetyl)-(γ-Glu)₃-(10-(4-carboxyphenoxy)decanoyl))-αMeY-LIK((2-[2-(2-Amino-ethoxy)-ethoxy]-acetyl)-(γ-Glu)₃--(10-(4-carboxyphenoxy)decanoyl))GGPSSGAPPPS-NH₂ | 497 | 5835.44 |
| 488 | Y-Aib-EGT-αMeF(2F)-TSD-4Pal-Aib-I-αMeL-LD-Orn-QAQ-Aib-K((2-[2-(2-Amino-ethoxy)-ethoxy]-acetyl)₂-(γ-Glu)-CO-(CH₂)₁₂-CO₂H)FI-(D-Glu)-αMeY-LIK((2-[2-(2-Amino-ethoxy)-ethoxy]-acetyl)₂-(γ-Glu)-CO-(CH₂)₁₂-CO₂H)GGPSSGAPPPS-NH₂ | 498 | 5524.24 |
| 489 | Y-Aib-EGT-αMeF(2F)-TSD-4Pal-Aib-I-αMeL-LD-Orn-QAQ-Aib-K((2-[2-(2-Amino-ethoxy)-ethoxy]-acetyl)₂-(γ-Glu)-CO-(CH₂)₁₂-CO₂H)FI-(D-Glu)-αMeY-LIEGGPSSGAPPPSK((2-[2-(2-Amino-ethoxy)-ethoxy]-acetyl)₂-(γ-Glu)-CO-(CH₂)₁₂-CO₂H)-NH₂ | 499 | 5653.35 |
| 490 | Y-Aib-EGT-αMeF(2F)-TSD-Nle-SI-αMeL-LD-Orn-QAQ-Aib-Orn-FIK((2-[2-(2-Amino-ethoxy)-ethoxy]-acetyl)₂-(γ-Glu)-CO-(CH₂)₁₂-CO₂H)-αMeY-LIK((2-[2-(2-Amino-ethoxy)-ethoxy]-acetyl)₂-(γ-Glu)-CO-(CH₂)₁₂-CO₂H)GGPSSGAPPPS-NH₂ | 500 | 5474.27 |
| 491 | Y-Aib-EGT-αMeF(2F)-TSD-hY-SI-αMeL-LD-Orn-QAQ-Aib-Orn-FIK((2-[2-(2-Amino-ethoxy)-ethoxy]-acetyl)₂-(γ-Glu)-CO-(CH₂)₁₂-CO₂H)-αMeY-LIK((2-[2-(2-Amino-ethoxy)-ethoxy]-acetyl)₂-(γ-Glu)-CO-(CH₂)₁₂-CO₂H)GGPSSGAPPPS-NH₂ | 501 | 5538.31 |
| 492 | Y-Aib-EGT-αMeF(2F)-TSDY-Aib-I-αMeL-LD-Orn-QAQ-Aib-Orn-FIK((2-[2-(2-Amino-ethoxy)-ethoxy]-acetyl)₂-(γ-Glu)--C10_4CP)-αMeY-LIK((2-[2-(2-Amino-ethoxy)-ethoxy]-acetyl)₂-(γ-Glu)--C10_4CP)GGPSSGAPPPS-NH₂ | 502 | 5624.31 |
| 493 | Y-Aib-EGT-αMeF(2F)-TSD-4Pal-Aib-I-αMeL-LD-Orn-QAQ-Aib-4Pal-FIK((2-[2-(2-Amino-ethoxy)-ethoxy]-acetyl)₂-(γ-Glu)-(10-(4-carboxyphenoxy)decanoyl))-αMeY-LIK((2-[2-(2-Amino-ethoxy)-ethoxy]-acetyl)₂-(γ-Glu)-(10-(4-carboxyphenoxy)decanoyl))GGPSSGAPPPS-NH₂ | 503 | 5643.32 |
| 494 | Y-Aib-EGT-aMeF(2F)-TSD-4Pal-Aib-I-aMeL-LD-Orn-K((2-[2-(2-Amino-ethoxy)-ethoxy]-acetyl)₂-(γ-Glu)-CO-(CH₂)₁₀-CH₃)AQ-Aib-GFIe-aMeY-LIK((2-[2-(2-Amino-ethoxy)-ethoxy]-acetyl)₂-(γ-Glu)-CO-(CH₂)₁₀-CH₃)GGPSSGAPPPS-NH2 | 504 | 5337.09 |

### Binding Assays

[0300] Glucagon (referred to as Gcg) is a Reference Standard prepared at Eli Lilly and Company. GLP-1, 7-36-NH₂ (referred to as GLP-1) is obtained from CPC Scientific (Sunnyvale, CA, 97.2% purity, 100 µM aliquots in 100% DMSO). GIP 1-42 (referred to as GIP) is prepared at Lilly Research Laboratories using peptide synthesis and HPLC chromatography as described above (>80% purity, 100 µM aliquots in 100% DMSO). [¹²⁵I]-radiolabeled Gcg, GLP-1, or GIP is prepared using [¹²⁵I]-lactoperoxidase and obtained from Perkin Elmer (Boston, MA).

[0301] Stably transfected cell lines are prepared by subcloning receptor cDNA into a pcDNA3 expression plasmid and transfected into human embryonic kidney (HEK) 293 (hGcgR and hGLP-1R) or Chinese Hamster Ovary (CHO) (hGIPR) cells followed by selection with Geneticin (hGLP-1R and hGIPR) or hygromycin B (hGcgR).

[0302] Two methods are used for the preparation of crude cell membranes.

[0303] Method 1: Frozen cell pellets are lysed on ice in hypotonic buffer containing 50 mM Tris HCl, pH 7.5, and Roche Complete™ Protease Inhibitors with EDTA. The cell suspension is disrupted using a glass Potter-Elvehjem homogenizer fitted with a Teflon® pestle for 25 strokes. The homogenate is centrifuged at 4° C. at 1100 × g for 10 minutes. The supernatant is collected and stored on ice while the pellets are resuspended in homogenization buffer and rehomogenized as described above. The homogenate is centrifuged at 1100 × g for 10 minutes. The second supernatant is combined with the first supernatant and centrifuged at 35000 × g for 1 hour at 4° C. The resulting membrane pellet is resuspended in homogenization buffer containing protease inhibitors at approximately 1 to 3 mg/mL, quick frozen in liquid nitrogen and stored as aliquots in a -80° C. freezer until use.

[0304] Method 2: Frozen cell pellets are lysed on ice in hypotonic buffer containing 50 mM Tris HCl, pH 7.5, 1 mM MgCh, Roche Complete™ EDTA-free Protease Inhibitors and 25 units/ml DNAse I (Invitrogen). The cell suspension is disrupted using a glass Potter-Elvehjem homogenizer fitted with a Teflon® pestle for 20 to 25 strokes. The homogenate is centrifuged at 4° C. at 1800 × g for 15 minutes. The supernatant is collected and stored on ice while the pellets are resuspended in homogenization buffer (without DNAse I) and rehomogenized as described above. The homogenate is centrifuged at 1800 × g for 15 minutes. The second supernatant is combined with the first supernatant and centrifuged an additional time at 1800 × g for 15 minutes. The overall supernatant is then centrifuged at 25000 × g for 30 minutes at 4° C. The resulting membrane pellet is resuspended in homogenization buffer (without DNAse I) containing protease inhibitors at approximately 1 to 3 mg/mL and stored as aliquots in a -80° C. freezer until use.

### Binding Determination Methods

[0305] The equilibrium binding dissociation constants (K_{d}) for the various receptor/radioligand interactions are determined from homologous competition binding analysis instead of saturation binding due to high propanol content in the [¹²⁵I] stock material. The K_{d} values determined for the receptor preparations were as follows: hGcgR (3.9 nM), hGLP-1R (1.2 nM) and hGIPR (0.14 nM).

### [¹²⁵I]-Glucagon Binding

[0306] The human Gcg receptor binding assays are performed using a Scintillation Proximity Assay (SPA) format with wheat germ agglutinin (WGA) beads (Perkin Elmer). The binding buffer contains 25 mM 4-(2-hydroxyethyl)-1-piperazineethanesulfonic acid (HEPES), pH 7.4, 2.5 mM CaCl₂, 1 mM MgCh, 0.1% (w/v) bacitracin (Research Products), 0.003% (w/v) Polyoxyethylenesorbitan monolaurate (TWEEN®-20), and Roche Complete™ Protease Inhibitors without EDTA. Peptides and Gcg are thawed and 3-fold serially diluted in 100% DMSO (10 point concentration response curves). Next, 5 µL serially diluted compound or DMSO is transferred into Corning® 3632 clear bottom assay plates containing 45 µL assay binding buffer or unlabeled Gcg control (non-specific binding or NSB, at 1 µM final). Then, 50 µL [¹²⁵I]-Gcg (0.15 nM final), 50 µL human GcgR membranes (1.5 µg/well) and 50 µL of WGA SPA beads (80 to 150 µg/well) are added with a Biotek Multiflo dispenser. Plates are sealed and mixed on a plate shaker (setting 6) for 1 minute and read with a PerkinElmer Trilux MicroBeta® scintillation counter after 12 hours of incubation/settling time at room temperature. Final assay concentration ranges for peptides tested in response curves is typically 1150 nM to 0.058 nM and for the control Gcg from 1000 nM to 0.05 nM.

### [¹²⁵I]-GLP-1 Binding

[0307] The human GLP-1 receptor binding assay is performed using an SPA format with WGA beads. The binding buffer contains 25 mM HEPES, pH 7.4, 2.5 mM CaCl₂, 1 mM MgCl₂, 0.1% (w/v) bacitracin, 0.003% (w/v) TWEEN®-20, and Roche Complete™ Protease Inhibitors without EDTA. Peptides and GLP-1 are thawed and 3-fold serially diluted in 100% DMSO (10 point concentration response curves). Next, 5 µL serially diluted compound or DMSO is transferred into Corning® 3632 clear bottom assay plates containing 45 µL assay binding buffer or unlabeled GLP-1 control (non-specific binding or NSB, at 0.25 µM final). Then, 50 µL [¹²⁵I]-GLP-1 (0.15 nM final), 50 µL human GLP-1R membranes (0.5 µg/well and 50 µL of WGA SPA beads (100 to 150 µg/well) are added with a Biotek Multiflo dispenser. Plates are sealed and mixed on a plate shaker (setting 6) for 1 minute and read with a PerkinElmer Trilux MicroBeta® scintillation counter after 5 to 12 hours of incubation/settling time at room temperature. Final assay concentration ranges for peptides tested in response curves are typically 1150 nM to 0.058 nM and for the control GLP-1, 250 nM to 0.013 nM.

### [125I]-GIP Binding

[0308] The human GIP receptor binding assay is performed using an SPA format with WGA beads. The binding buffer contains 25 mM HEPES, pH 7.4, 2.5 mM CaCl₂, 1 mM MgCl₂, 0.1% (w/v) bacitracin, 0.003% (w/v) TWEEN®-20, and Roche Complete™ Protease Inhibitors without EDTA. Peptides and GIP are thawed and 3 fold serially diluted in 100% DMSO (10 point concentration response curves). Next, 5 µL serially diluted compound or DMSO is transferred into Corning® 3632 clear bottom assay plates containing 45 µL assay binding buffer or unlabeled GIP control (non-specific binding or NSB, at 0.25 µM final). Then, 50 µL [¹²⁵I]-GIP (0.075-0.15 nM final), 50 µL human GIPR membranes (3 µg/well) and 50 µL of WGA SPA beads (100 to 150 µg/well) are added with a Biotek Multiflo dispenser. Plates are sealed and mixed on a plate shaker (setting 6) for 1 minute and read with a PerkinElmer Trilux MicroBeta® scintillation counter after 2.5 to 12 hours of incubation/settling time at room temperature. Final assay concentration ranges for peptides tested in response curves is typically 1150 to 0.058 nM or 115 nM to 0.0058 nM and for the control GIP, 250 nM to 0.013 nM.

### Binding Assay Data Analysis

[0309] Raw CPM data for concentration curves of peptides, Gcg, GLP-1, or GIP are converted to percent inhibition by subtracting nonspecific binding (binding in the presence of excess unlabeled Gcg, GLP-1, or GIP, respectively) from the individual CPM values and dividing by the total binding signal, also corrected by subtracting nonspecific binding. Data are analyzed using four-parameter (curve maximum, curve minimum, IC₅₀, Hill slope) nonlinear regression routines (Genedata Screener, version 12.0.4, Genedata AG, Basal, Switzerland). The affinity constant (Kᵢ) is calculated from the absolute IC₅₀ value based upon the equation Kᵢ = IC₅₀/(1 + D/K_{d}) where D is the concentration of radioligand used in the experiment, IC₅₀ is the concentration causing 50% inhibition of binding and K_{d} is the equilibrium binding dissociation constant of the radioligand (described above). Values for Kᵢ are reported as the geometric mean, with error expressed as the standard error of the mean (SEM) and n is equal to the number of independent replicates (determined in assays performed on different days). Geometric Means are calculated as follows:

$${\text{Geometric Mean = 10}}^{\left(\text{Arithmetic Mean of Log Ki Values)}\right)}$$

[0310] The Ki Ratio (Ki for native control peptide/Ki for test compound) at each receptor and each species is calculated. The Ki Ratio is a rapid indication of the apparent affinity of a peptide compared to the native control peptide. A Ki Ratio < 1 indicates that the test peptide has a lower affinity (higher Ki value) for the receptor than the native peptide, whereas a Ki Ratio >1 indicates that the test peptide has a higher affinity (lower Ki value) for the receptor than the native peptide.

[0311] n=⅟x means that only one value out of the total number of replicates (x) is used to express the mean. SEM is only calculated when n=2 or greater non-qualified results exist. Means are expressed as GeoMetric means with the standard error of the mean (SEM) and the number of replicates (n) indicated in parenthesis.

TABLE 1

In vitro Binding Affinity (Kᵢ) of indicated Examples and comparator molecules for human GLP-1R, GcgR and GIPR.
Binding Affinity
Ki, nM (SEM, n)

| Molecule or Example | hGIPR | hGLP-1R | hGCGR |
|---|---|---|---|
| hGIP(1-42)NH2 | 0.135 (0.00585, 378/380) | | |
| hGLP-1(7-36)NH2 | | 0.791 (0.0236, 545) | |
| hGCG | | | 3.07 (0.115, 510/511) |
| 1 | 0.0880 (0.0147, 3) | 2.33 (0.341, 3) | >969 (⅓) |
| 2 | 0.0446 | 1.04 | >958 |
| 3 | 0.0629 | 0.471 | 711 |
| 4 | 0.0528 (0.0149, 2) | 0.413 (0.0153, 2) | 637 (12.3, 2) |
| 5 | 0.0309 (0.00250, 3) | 0.154 (0.0391, 3) | 44.8 (53.4, 3) |
| 6 | 0.145 | 2.99 | >969 |
| 7 | 0.0501 (0.00636, 3) | 0.362 (0.101, 3) | 1.46 (0.930, 3) |
| 8 | 0.0240 (0.00569, 3) | 0.139 (0.0154, 3) | 4.29 (4.32, 3) |
| 9 | 0.0557 (0.00698, 3) | 1.05 (0.0625, 3) | 209 (⅓) |
| 10 | 0.0489 (0.00825, 2) | 0.681 (0.0423, 2) | 424 (214, 2) |
| 11 | 0.0508 (0.00450, 2) | 1.06 (0.222, 2) | 660 (24.3, 2) |
| 12 | 0.0575 (0.00224, 2) | 0.638 (0.249, 2) | 213 (27.9, 2) |
| 13 | 0.0575 (0.0351, 2) | 0.691 (0.304, 2) | 0.987 (0.0552, 2) |
| 14 | 0.0360 (0.00828, 2) | 0.286 (0.170, 2) | 17.6 (0.912, 2) |
| 15 | 0.0629 (0.00467, 3) | 2.11 (0.383, 3) | >966 (⅓) |
| 16 | 0.0540 (0.0165, 3) | 1.40 (0.275, 3) | 707 (53.3, ⅔) |
| 17 | 0.0649 (0.0248, 3) | 3.18 (0.127, 3) | >966 (⅓) |
| 18 | 0.0769 (0.0200, 2) | 8.41 (2.71, 2) | >958 (½) |
| 19 | 0.0807 (0.00750, 3) | 3.13 (0.185, 3) | >966 (⅓) |
| 20 | 0.0722 (0.00347, 4) | 1.96 (0.319, 4) | 139 (27.5, 4) |
| 21 | 0.0231 (0.00290, 3) | 0.246 (0.0413, 3) | 0.293 (0.0186, 3) |
| 22 | 0.0217 (0.00493, 3) | 0.301 (0.0914, 3) | 0.596 (0.0330, 3) |
| 23 | 0.0238 (0.00306, 3) | 0.251 (0.0187, 3) | 1.18 (0.130, 3) |
| 24 | 0.0361 (0.00975, 3) | 0.520 (0.0555, 3) | 0.646 (0.0169, 3) |
| 25 | 0.0293 (0.0105, 3) | 0.483 (0.0966, 3) | 0.283 (0.0162, 3) |
| 26 | 0.0863 (0.00997, 3) | 0.867 (0.300, 3) | 3.82 (0.560, 3) |
| 27 | 0.378 (0.140, 2) | 6.48 (1.80, 2) | >958 (½) |
| 28 | 0.0972 (0.00197, 2) | 3.01 (0.442, 2) | >966 (½) |
| 29 | 0.0505 | 0.412 | 0.923 |
| 30 | 0.0653 (0.0190, 2) | 2.66 (0.303, 2) | >966 (½) |
| 31 | 0.0308 | 0.315 | 0.62 |
| 33 | 0.117 | 1.34 | 264 |
| 34 | 0.131 | 2.81 | >957 |
| 35 | 0.077 | 1.38 | 868 |
| 36 | 0.103 | 1.47 | 611 |
| 37 | 0.171 | 2.22 | >957 |
| 38 | 0.0608 | 0.803 | 174 |
| 39 | 0.234 | 1.69 | 412 |
| 40 | 0.163 | 1.6 | 223 |
| 41 | 0.108 | 2.06 | >957 |
| 42 | 0.0759 | 2.02 | 458 |
| 43 | 0.092 | 2.5 | >957 |
| 44 | 0.0595 | 3.08 | >966 |
| 45 | 0.0891 | 6.9 | >966 |
| 46 | 0.0683 | 6.1 | >966 |
| 47 | 0.0761 | 29 | 217 |
| 48 | 0.0621 | 3.67 | >966 |
| 49 | 0.0573 | 1.21 | 196 |
| 50 | 0.0296 | 0.876 | 42 |
| 51 | 0.0741 | 1.64 | 51.7 |
| 52 | 0.0832 | 1.16 | >966 |
| 53 | 0.085 | 1.46 | 274 |
| 55 | 0.252 | 5.17 | 299 |
| 56 | 0.152 | 2.85 | 137 |
| 57 | 0.297 | 4.35 | 114 |
| 58 | 0.208 | 1.15 | 1920 |
| 59 | 0.171 | 0.789 | 2000 |
| 60 | 0.11 | 0.872 | 737 |
| 62 | 0.132 | 1.59 | >4780 |
| 64 | 0.161 | 1.52 | >4780 |
| 65 | 0.121 | 1.05 | 4290 |
| 66 | 0.263 | 1.55 | 4150 |
| 70 | 0.120 (0.0470, 2) | 1.67 (0.736, 4) | 151 |
| 73 | 0.0454 | 3.38 | 53.9 |
| 75 | 0.107 | 2.8 | 206 |
| 78 | 0.0627 | 0.881 (0.349, 4) | 625 |
| 91 | 0.126 | 1.26 (0.316, 4) | >955 |
| 128 | 0.0314 | 0.777 (0.202, 4) | >955 |
| 137 | 0.0403 | 0.250 (0.0518, 4) | 8.29 |
| 139 | 0.0415 (0.00520, 2) | 0.268 (0.0773, 4) | 109 |
| 141 | 0.0291 (0.00776, 2) | 0.194 (0.0837, 4) | 13.9 |
| 212 | 0.161 | 1.17 (0.333, 4) | >955 |
| 216 | 0.0491 | 0.863 (0.505, 4) | 328 |
| 219 | 0.114 | 0.939 (0.627, 4) | 135 |
| 246 | 0.0432 (0.00892, 2) | 0.557 | 44.6 |
| 292 | 0.0161 (0.00313, 5) | 0.289 (0.0849, 5) | 132 (25.5, 5) |
| 293 | 0.022 | 0.211 | 23.1 |
| 298 | 0.0131 | 0.119 | 14.3 |
| 299 | 0.0215 | 0.101 | 93.3 |
| 302 | 0.0228 | 0.137 | 2.84 |
| 322 | 0.0162 (0.00203, 5) | 0.234 (0.0542, 5) | 2.91 (0.693, 5) |
| 324 | 0.0163 (0.00117, 5) | 0.168 (0.0289, 5) | 6.28 (0.938, 5) |
| 334 | 0.0195 (0.00139, 5) | 0.325 (0.0497, 5) | 75.5 (12.7, 5) |
| 336 | 0.0782 | 1.85 | 230 |
| 337 | 0.0747 | 2.17 | >957 |
| 338 | 0.091 | 2.07 | >957 |
| 360 | 0.046 | 0.673 | 118 |
| 361 | 0.0578 | 1.22 | 238 |
| 362 | 0.053 | 0.765 | 360 |
| 391 | 0.0279 (0.00204, 4) | 0.346 (0.0663, 3) | 289 (41.4, 3) |
| 403 | 0.0375 | 0.424 | 134 |
| 411 | 0.0375 (0.00780, 2) | 1.33 | >957 |
| 414 | 0.0229 (0.000330, 3) | 0.194 (0.0265, 3) | 33.7 (5.31, 3) |
| 415 | 0.0152 (0.00797, 2) | 0.156 (0.109, 2) | 51.8 (18.2, 2) |
| 417 | 0.0214 (0.00497, 3) | 0.167 (0.0783, 3) | 58.4 (7.11, 3) |
| 418 | 0.0174 (0.00276, 2) | 0.0684 | 3.59 (1.87, 2) |
| 419 | 0.0166 | 0.265 | 60.6 |
| 421 | 0.0245 (0.00418, 3) | 0.198 (0.0413, 3) | 345 (101, 3) |
| 422 | 0.0218 (0.00310, 3) | 0.194 (0.0162, 3) | 12.2 (1.63, 3) |
| 423 | 0.0207 (0.00795, 3) | 0.275 (0.0192, 3) | 85.9 (10.6, 3) |
| 424 | 0.0206 (0.00786, 3) | 0.219 (0.0306, 3) | 16.0 (1.93, 3) |
| 432 | 0.0134 (0.00295, 2) | 0.134 (0.00717, 2) | 356 (72.8, 2) |
| 433 | 0.0175 | 0.187 | 28.3 |
| 434 | 0.00965 (0.00495, 2) | 0.150 (0.0253, 2) | 81.2 (12.2, 2) |
| 435 | 0.00910 (0.000766, 2) | 0.122 (0.00471, 2) | 14.4 (1.56, 2) |
| 436 | 0.0372 | 0.412 | 64.9 |
| 440 | 0.0312 (0.00264, 3) | 0.373 (0.118, 3) | 131 (27.8, 3) |
| 441 | 0.0539 (0.0323, 2) | 0.386 (0.0706, 2) | 592 (½) |
| 442 | 0.0507 | 0.164 | 130 |
| 446 | 0.0369 (0.00841, 2) | 0.382 (0.116, 2) | 109 (11.0, 2) |
| 448 | 0.0314 (0.00845, 2) | 0.367 (0.103, 2) | 116 (13.5, 2) |
| 449 | 0.0133 | 0.201 | 243 |
| 451 | 0.0239 | 0.234 | 258 |
| 453 | 0.013 | 0.123 | 71.8 |
| 455 | 0.0143 | 0.243 | 60.1 |
| 457 | 0.0419 (0.0217, 2) | 0.252 (0.0198, 2) | 351 (0.454, 2) |
| 458 | 0.0232 | 0.266 | 170 |
| 459 | 0.023 | 0.224 | 108 |
| 460 | 0.0528 (0.0151, 2) | 0.433 (0.0173, 2) | >959 (½) |
| 461 | 0.0100 (0.00141, 2) | 0.140 (0.0483, 2) | 101 (26.9, 2) |
| 462 | 0.0102 | 0.125 | 87.5 |
| 463 | 0.0183 | 0.143 | 54.5 |
| 464 | 0.0261 (0.00416, 2) | 0.352 (0.0418, 2) | 753 (58.6, 2) |
| 465 | 0.0464 | 1.29 | 304 |
| 466 | 0.0199 (0.00474, 2) | 0.200 (0.0377, 2) | 342 (223, 2) |
| 467 | 0.0486 | 0.381 | 208 |
| 468 | 0.0291 | 0.0943 | 269 |
| 469 | 0.0387 | 0.0847 | 144 |
| 470 | 0.0346 | 0.121 | 945 |
| 471 | 0.0493 | 0.197 | 452 |
| 472 | 0.0376 | 0.254 | 258 |
| 473 | 0.0319 | 0.169 | 162 |
| 474 | 0.0427 | 0.343 | 382 |
| 475 | 0.0294 | 0.189 | 139 |
| 476 | 0.0351 | 0.226 | 605 |
| 477 | 0.0279 | 0.143 | 268 |
| 478 | 0.0406 | 0.407 | 49.7 |
| 479 | 0.0249 | 0.246 | 213 |
| 480 | 0.0368 | 0.307 | 88.5 |
| 481 | 0.0266 | 0.326 | 20.1 |
| 482 | 0.0277 | 0.254 | 273 |
| 483 | 0.0236 | 0.263 | 151 |
| 484 | 0.0296 | 0.268 | 305 |
| 485 | 0.0548 | 0.3 | 121 |
| 486 | 0.046 | 0.299 | 115 |
| 487 | 0.0714 | 0.217 | 73.3 |
| 488 | 0.064 | 0.964 | >958 |
| 489 | 0.0912 | 0.947 | >957 |
| 490 | 0.0288 | 0.27 | 37.8 |
| 491 | 0.0301 | 0.182 | 94.4 |
| 492 | 0.0264 | 0.233 | 28.6 |
| 493 | 0.0345 | 0.25 | 70.1 |
| 494 | 0.0197 (0.00489, 2) | 0.188 (0.0462, 2) | 135 (26.5, 2) |

### Functional Activity

### Functional hGIP-R, hGLP-1R and hGCGR Assays

[0312] Methods: Functional activity is determined using cAMP formation in HEK-293 clonal cell lines expressing hGIPR, hGLP-1R or hGCGR. hGIPR, hGLP-1R or hGCGR receptor-expressing cells are treated with a control polypeptide or one of Examples 1 to 3 (20 point concentration-response curve in DMSO, 2.75-fold Labcyte Echo direct dilution, 384 well plate Corning Cat# 3570) in DMEM (Gibco Cat# 31053) supplemented with 1X GlutaMAX™ (Gibco Cat# 35050), 0.1% bovine casein (Sigma C4765-10ML), 250 µM IBMX (3-Isobutyl-1-methylxanthine, Acros Cat# 228420010) and 20 mM HEPES (Gibco Cat# 15630) in a 20 µL assay volume (final DMSO concentration was 0.5%). Experiments also are performed under identical assay conditions with the addition of 1.0 % fatty acid free, globulin free human serum albumin (Sigma Cat# A3782).

[0313] After a 30-min incubation at 37° C., the resulting increase in intracellular cAMP is quantitatively determined using a CisBio cAMP Dynamic 2 HTRF Assay Kit (62AM4PEJ). Briefly, cAMP levels within the cell are detected by adding the cAMP-d2 conjugate in cell lysis buffer (10 µL) followed by the antibody anti-cAMP-Eu³⁺-Cryptate, also in cell lysis buffer (10 µL). The resulting competitive assay is incubated for at least 60 min at room temperature, and then is detected using a PerkinElmer Envision® instrument with excitation at 320 nm and emission at 665 nm and 620 nm. Envision units (emission at 665 nm/620 nm* 10,000) are inversely proportional to the amount of cAMP present and are converted to nM cAMP per well us-ing a cAMP standard curve. The amount of cAMP generated (nM) in each well is converted to a percent of the maximal response observed with human GIP(1-42)NH₂, hGLP-1(7-36)NH₂ or hGCG. A relative EC₅₀ value and percent top (Eₘₐₓ) are derived by non-linear regression analysis using the percent maximal response vs. the concentration of peptide added, fitted to a four-parameter logistic equation.

[0314] Results: Functional data for hGIP(1-42)NH₂, hGLP-1(7-36)NH₂, hGCG and the Example compounds are provided below in Table 2 (0.1% bovine casein) and Table 3 (0.1% bovine casein, 1.0% human serum albumin).

TABLE 2

Functional cAMP Potency (EC₅₀) and Efficacy (Eₘₐₓ) for Peptides Incubated at 37° C. (in the presence of 0.1% bovine casein)

| | hGIPR ^{a} | | hGLP-1R ^{a} | | hGCGR^{a} | |
|---|---|---|---|---|---|---|
| Example | EC₅₀, nM (SEM, n) ^{b} | Emax, % ± SEM ^{c} | EC₅₀, nM (SEM, n) ^{b} | Emax, % ± SEM ^{c} | EC₅₀, nM (SEM, n) ^{b} | Emax, % ± SEM ^{c} |
| hGIP(1-42)NH2 | 0.988 (0.0675, 244/246) | 100 ± 0.863 | | | | |
| hGLP-1(7-36)NH2 | | | 0.315 (0.00999, 400) | 106 ± 0.687 | | |
| hGCG | | | | | 1.95 (0.0802, 301) | 101 (se=1.13, n=301) |
| 1 | 0.0145 (0.00159, 5) | 90.2 ± 2.82 | 0.925 (0.101, 5) | 97.0 ± 4.47 | >9950 (n=⅕) | ND |
| 6 | 0.0477 (0.00717, 3) | 101 ± 3.61 | 2.30 (0.212, 3) | 105 ± 1.05 | >9950 (n=⅓) | ND |
| 2 | 0.0154 (0.000643, 5) | 93.0 ± 0.813 | 1.14 (0.0827, 5) | 93.1 ± 5.83 | >9950 (n=⅕) | ND |
| 3 | 0.0133 (0.00186, 3) | 95.9 ± 2.95 | 0.223 (0.0583, 3) | 107 ± 2.51 | >9950 (n=⅓) | ND |
| 4 | 0.00962 (0.000822, 6) | 92.9 ± 0.381 | 0.137 (0.0117, 6) | 99.2 ± 1.24 | >9950 (n=⅙) | ND |
| 7 | 0.00327 (0.000331, 8) | 99.5 ± 2.88 | 0.00676 (0.00104, 8) | 95.4 ± 5.03 | >9950 (n=⅛) | ND |
| 8 | 0.00307 (0.000291, 5) | 103 ± 3.48 | 0.0157 (0.00381, 5) | 103 ± 2.63 | >9950 (n=⅕) | ND |
| 5 | 0.00585 (0.000683, 6) | 99.9 ± 0.649 | 0.0570 (0.0122, 6) | 103 ± 4.79 | >9150 (n=⅙) | ND |
| 9 | 0.0102 (0.000680, 5) | 93.6 ± 2.36 | 0.421 (0.0704, 5) | 98.0 ± 4.97 | >9950 (n=⅕) | ND |
| 10 | 0.0106 (0.00115, 4) | 97.9 ± 1.99 | 0.329 (0.0311, 4) | 99.1 ± 4.04 | >9950 (n=¼) | ND |
| 11 | 0.0135 (0.00157, 5) | 97.7 ± 2.82 | 0.511 (0.0355, 5) | 102 ± 2.11 | >9950 (n=⅕) | ND |
| 12 | 0.0127 (0.000647, 5) | 100.0 ± 3.09 | 0.423 (0.0365, 5) | 105 ± 5.32 | >9950 (n=⅕) | ND |
| 13 | 0.00597 (0.000599, 6) | 99.0 ± 1.77 | 0.0214 (0.00421, 6) | 104 ± 4.07 | >9950 (n=⅙) | ND |
| 14 | 0.00802 (0.00123, 6) | 95.0 ± 2.32 | 0.0884 (0.00658, 6) | 100 ± 3.78 | >9950 (n=⅙) | ND |
| 15 | 0.0133 (0.00177, 6) | 95.9 ± 2.34 | 0.995 (0.149, 6) | 94.3 ± 4.44 | >9950 (n=⅙) | ND |
| 16 | 0.0113 (0.00240, 6) | 101 ± 4.45 | 0.245 (0.0192, 6) | 104 ± 1.61 | >9950 (n=⅙) | ND |
| 17 | 0.0129 (0.00209, 5) | 97.5 ± 5.04 | 1.57 (0.314, 5) | 106 ± 4.38 | >9950 (n=⅕) | ND |
| 18 | 0.0226 (0.00161, 4) | 97.1 ± 3.28 | 5.06 (0.710, 4) | 104 ± 4.11 | >9950 (n=¼) | ND |
| 19 | 0.0158 (0.00198, 4) | 96.6 ± 2.70 | 1.34 (0.201, 4) | 104 ± 1.72 | >9950 (n=¼) | ND |
| 20 | 0.00985 (0.000468, 3) | 98.8 ± 3.19 | 0.552 (0.0748, 3) | 103 ± 3.37 | >9950 (n=⅓) | ND |
| 21 | 0.00347 (0.000301, 4) | 102 ± 2.44 | 0.00655 (0.000594, 4) | 106 ± 2.32 | >9950 (n=¼) | ND |
| 22 | 0.00656 (0.00118, 4) | 102 ± 3.06 | 0.0153 (0.00165, 4) | 98.6 ± 2.87 | >9950 (n=¼) | ND |
| 23 | 0.00299 (0.000153, 4) | 101 ± 3.70 | 0.00722 (0.00106, 4) | 102 ± 3.01 | >9950 (n=¼) | ND |
| 24 | 0.00266 (0.000185, 5) | 104 ± 2.75 | 0.00630 (0.000480, 5) | 104 ± 3.48 | >9950 (n=⅕) | ND |
| 25 | 0.00243 (0.000195, 5) | 101 ± 4.03 | 0.00426 (0.000485, 5) | 102 ± 5.06 | >9950 (n=⅕) | ND |
| 26 | 0.0218 (0.00198, 5) | 99.1 ± 0.793 | 0.0711 (0.00713, 5) | 106 ± 4.85 | >9950 (n=⅕) | ND |
| 27 | 0.116 | 88.8 | 2.77 | 102 | >9950 | ND |
| 28 | 0.0554 (0.0177, 3) | 95.4 ± 1.58 | 2.65 (0.180, 3) | 99.2 ± 4.11 | >9950 (n=⅓) | ND |
| 29 | 0.00252 (0.000214, 3) | 101 ± 3.24 | 0.00468 (0.000882, 3) | 100 ± 6.65 | >9950 (n=⅓) | ND |
| 30 | 0.0175 (0.00401, 3) | 99.3 ± 4.47 | 2.27 (0.367, 3) | 97.8 ± 10.7 | >9950 (n=⅓) | ND |
| 31 | 0.00157 (0.000662, 2) | 100.0 ± 5.25 | 0.00342 (0.00136, 2) | 91.3 ± 16.1 | >9950 (n=½) | ND |
| 32 | 0.002 | 98.4 | 0.0063 | 119 | >9950 | ND |
| 33 | 0.00957 (0.00110, 3) | 97.6 ± 2.45 | 0.370 (0.0515, 3) | 102 ± 4.78 | >9950 (n=⅓) | ND |
| 34 | 0.0148 (0.00105, 2) | 97.4 ± 2.34 | 1.00 (0.141, 2) | 99.6 ± 4.28 | >9950 (n=½) | ND |
| 35 | 0.0162 (0.00309, 3) | 97.0 ± 2.32 | 0.612 (0.125, 3) | 107 ± 4.76 | >9950 (n=⅓) | ND |
| 36 | 0.0185 (0.00551, 3) | 95.4 ± 2.02 | 0.536 (0.0920, 3) | 100 ± 3.79 | >9950 (n=⅓) | ND |
| 37 | 0.0211 (0.0115, 2) | 91.2 ± 3.67 | 0.909 (0.0795, 3) | 105 ± 3.13 | >9950 (n=⅓) | ND |
| 38 | 0.0155 (0.00104, 3) | 99.7 ± 1.92 | 0.225 (0.0142, 3) | 106 ± 1.38 | >9950 (n=⅓) | ND |
| 39 | 0.0238 (0.00641, 3) | 96.5 ± 1.44 | 0.358 (0.0311, 3) | 105 ± 6.57 | >9950 (n=⅓) | ND |
| 40 | 0.0116 (0.00653, 2) | 99.7 ± 2.94 | 0.279 (0.0725, 2) | 101 ± 5.30 | >9950 (n=½) | ND |
| 41 | 0.0108 (0.000456, 2) | 101 ± 3.16 | 0.691 (0.0736, 2) | 102 ± 3.70 | >9950 (n=½) | ND |
| 42 | 0.0103 (0.00133, 2) | 97.8 ± 7.18 | 0.429 (0.0612, 2) | 104 ± 1.38 | >9950 (n=½) | ND |
| 43 | 0.0123 (0.00510, 2) | 92.6 ± 5.56 | 0.821 (0.00670, 2) | 106 ± 2.02 | >9950 (n=½) | ND |
| 44 | 0.0637 (0.0744, 2) | 92.2 ± 6.17 | 4.77 (0.859, 2) | 90.9 ± 10.4 | >9950 (n=½) | ND |
| 45 | 0.0517 (0.0654, 2) | 91.3 ± 1.04 | 9.18 (5.30, 2) | 85.7 ± 8.37 | >9950 (n=½) | ND |
| 46 | 0.0801 (0.0992, 2) | 89.5 ± 2.64 | 3.29 (1.49, 2) | 79.2 ± 1.23 | >9950 (n=½) | ND |
| 47 | 0.0138 (0.00357, 2) | 89.8 ± 1.20 | 1.94 (4.03, 2) | 87.1 ± 14.1 | >9950 (n=½) | ND |
| 48 | 0.0182 (0.00262, 2) | 91.6 ± 3.38 | 1.000 (1.43, 2) | 87.8 ± 6.25 | >9950 (n=½) | ND |
| 49 | 0.0205 (0.00423, 5) | 91.0 ± 1.70 | 0.398 (0.0572, 5) | 97.3 ± 5.46 | >9950 (n=⅕) | ND |
| 50 | 0.0168 (0.00162, 4) | 94.7 ± 1.77 | 0.273 (0.0222, 4) | 101 ± 6.20 | >9950 (n=¼) | ND |
| 51 | 0.110 (0.0153, 2) | 101 ± 0.990 | 0.890 (0.0286, 2) | 85.7 ± 9.80 | >9950 (n=½) | ND |
| 52 | 0.258 (0.00726, 2) | 104 ± 1.25 | 0.384 (0.116, 2) | 84.3 ± 6.96 | >9950 (n=½) | ND |
| 53 | 0.0841 (0.0165, 4) | 99.6 ± 2.21 | 0.180 (0.0157, 4) | 89.9 ± 9.41 | >9950 (n=¼) | ND |
| 54 | 0.0675 | 113 | 0.538 | 101 | >9950 | ND |
| 55 | 0.0207 (0.00345, 4) | 97.1 ± 2.16 | 0.154 (0.0278, 4) | 108 ± 1.94 | >9950 (n=¼) | ND |
| 56 | 0.0138 (0.00215, 4) | 90.3 ± 2.57 | 0.205 (0.0208, 4) | 106 ± 4.02 | >9950 (n=¼) | ND |
| 57 | 0.0135 (0.00176, 3) | 91.5 ± 4.94 | 0.140 (0.0119, 3) | 102 ± 2.52 | >9950 (n=⅓) | ND |
| 58 | 0.0158 (0.00284, 3) | 89.2 ± 5.96 | 0.194 (0.0220, 3) | 101 ± 5.94 | >9950 (n=⅓) | ND |
| 59 | 0.0240 (0.00529, 3) | 89.2 ± 4.62 | 0.202 (0.0167, 3) | 107 ± 4.27 | >9950 (n=⅓) | ND |
| 60 | 0.0126 (0.00263, 3) | 94.0 ± 6.07 | 0.190 (0.0132, 3) | 97.2 ± 4.28 | >9950 (n=⅓) | ND |
| 61 | 0.012 | 88.2 | 1.35 | 82.9 | >9950 | ND |
| 62 | 0.0211 (0.00397, 3) | 96.1 ± 2.64 | 0.480 (0.0200, 3) | 99.4 ± 5.83 | >9950 (n=⅓) | ND |
| 63 | 0.0176 | 92.7 | 1.86 | 90.6 | >9950 | ND |
| 64 | 0.0158 (0.00140, 3) | 92.9 ± 3.06 | 0.557 (0.0434, 3) | 97.3 ± 4.13 | >9950 (n=⅓) | ND |
| 65 | 0.0139 (0.00208, 3) | 95.2 ± 2.93 | 0.300 (0.0590, 3) | 103 ± 0.751 | >9950 (n=⅓) | ND |
| 66 | 0.0168 (0.00351, 3) | 93.5 ± 1.39 | 0.355 (0.0103, 3) | 104 ± 1.78 | >9950 (n=⅓) | ND |
| 67 | 0.00795 | 95 | 2.63 | 91.7 | >9950 | ND |
| 68 | 0.0105 | 106 | 0.668 | 95.9 | >9950 | ND |
| 69 | 0.0265 (0.00500, 3) | 99.0 ± 2.43 | 0.276 (0.00951, 4) | 103 ± 1.65 | >9950 (n=¼) | ND |
| 70 | 0.0182 (0.00101, 4) | 89.1 ± 2.30 | 0.283 (0.0345, 5) | 100.0 ± 3.11 | >9950 (n=⅕) | ND |
| 71 | 0.0171 (0.00174, 3) | 93.8 ± 3.59 | 0.246 (0.0242, 4) | 106 ± 1.60 | >9950 (n=¼) | ND |
| 72 | 0.0160 (0.00172, 3) | 96.5 ± 3.71 | 0.245 (0.0271, 4) | 103 ± 3.06 | >9950 (n=¼) | ND |
| 73 | 0.0207 (0.00350, 4) | 97.1 ± 2.70 | 0.437 (0.0687, 4) | 99.2 ± 1.69 | >9950 (n=¼) | ND |
| 74 | 0.0156 (0.00216, 3) | 93.3 ± 2.89 | 0.334 (0.0383, 4) | 105 ± 3.28 | >9950 (n=¼) | ND |
| 75 | 0.0182 (0.00258, 4) | 92.3 ± 0.780 | 0.411 (0.0467, 5) | 104 ± 4.00 | >9950 (n=⅕) | ND |
| 76 | 0.0205 (0.00391, 4) | 102 ± 3.22 | 0.527 (0.0914, 4) | 93.5 ± 1.85 | >9950 (n=¼) | ND |
| 77 | 0.0288 (0.00467, 3) | 94.8 ± 2.69 | 3.03 (0.922, 3) | 87.0 ± 1.71 | >9950 (n=⅓) | ND |
| 78 | 0.0145 (0.00447, 4) | 101 ± 2.27 | 0.286 (0.0619, 4) | 100 ± 2.19 | >9950 (n=¼) | ND |
| 79 | 0.0130 (0.00567, 2) | 101 ± 0.395 | 0.223 (0.0242, 2) | 102 ± 1.09 | >9950 (n=½) | ND |
| 80 | 0.0245 (0.00347, 4) | 92.4 ± 1.14 | 0.718 (0.155, 4) | 102 ± 4.87 | >9950 (n=¼) | ND |
| 81 | 0.0114 (0.00273, 2) | 98.6 ± 6.19 | 0.176 (0.0351, 2) | 102 ± 3.94 | >9950 (n=½) | ND |
| 82 | 0.0206 (0.00375, 2) | 81.4 ± 6.09 | 4.78 (1.32, 2) | 103 ± 1.82 | >9950 (n=½) | ND |
| 83 | 0.0223 (0.00261, 2) | 89.6 ± 7.35 | 0.451 (0.0979, 2) | 103 ± 4.98 | >9950 (n=½) | ND |
| 84 | 0.0315 | 98.5 | 5.27 | 94 | >9950 | ND |
| 85 | 0.0312 | 91.7 | 7.69 | 95.3 | >9950 | ND |
| 86 | 0.0184 (0.00461, 2) | 94.2 ± 1.16 | 0.359 (0.0267, 2) | 103 ± 1.21 | >9950 (n=½) | ND |
| 87 | 0.029 | 84.7 | 1.34 | 106 | >9950 | ND |
| 88 | 0.00884 | 85.1 | 6.08 | 97.1 | >9950 | ND |
| 89 | 0.0301 (0.00853, 2) | 88.9 ± 3.76 | 1.03 (0.293, 2) | 105 ± 2.00 | >9950 (n=½) | ND |
| 90 | 0.0436 (0.0112, 3) | 93.0 ± 3.31 | 0.221 (0.0317, 3) | 96.2 ± 1.50 | >9950 (n=⅓) | ND |
| 91 | 0.0739 (0.0337, 3) | 92.8 ± 4.69 | 0.153 (0.0297, 3) | 94.0 ± 5.44 | >9950 (n=⅓) | ND |
| 92 | 0.0251 (0.0114, 2) | 104 ± 4.05 | 0.942 (0.0878, 2) | 105 ± 2.61 | >9950 (n=½) | ND |
| 93 | 0.0448 (0.0197, 2) | 99.4 ± 6.93 | 0.575 (0.0808, 2) | 106 ± 1.59 | >9950 (n=½) | ND |
| 94 | 0.0132 | 91 | 2.1 | 97.4 | >9950 | ND |
| 95 | 0.0748 | 97.3 | 0.181 | 86.9 | >9950 | ND |
| 96 | 0.0484 | 107 | 6.81 | 103 | >9950 | ND |
| 97 | 0.0276 (0.00391, 3) | 97.0 ± 1.53 | 0.683 (0.124, 3) | 96.6 ± 1.60 | >9950 (n=⅓) | ND |
| 98 | 0.0148 (0.00572, 3) | 97.7 ± 2.54 | 0.227 (0.0401, 3) | 98.6 ± 4.62 | >9950 (n=⅓) | ND |
| 99 | 0.0235 (0.00111, 2) | 93.4 ± 1.02 | 0.349 (0.114,3) | 99.1 ± 4.31 | >9950 (n=⅓) | ND |
| 100 | | | 11.4 | 111 | >9950 | ND |
| 101 | 0.0297 | 92.1 | 2.94 | 106 | >9950 | ND |
| 102 | | | 19.1 | 93.7 | >9950 | ND |
| 103 | 0.0305 | 92.8 | 2.10 (0.127, 2) | 106 ± 0.389 | >9950 (n=½) | ND |
| 104 | 0.0361 | 94.9 | 0.417 (0.00529, 2) | 107 ± 1.35 | >9950 (n=½) | ND |
| 105 | 0.0366 (0.00225, 3) | 103 ± 4.03 | 0.520 (0.0485, 3) | 105 ± 1.91 | >9950 (n=⅓) | ND |
| 106 | 0.0385 (0.00452, 3) | 98.7 ± 3.32 | 0.296 (0.0390, 3) | 103 ± 2.32 | >9950 (n=⅓) | ND |
| 107 | 0.0473 | 94.3 | 1.01 | 93.4 | >9950 | ND |
| 108 | 0.0249 | 85.2 | 0.701 | 97.6 | >9950 | ND |
| 109 | 0.0236 | 84.8 | 0.846 | 102 | >9950 | ND |
| 110 | 0.0417 | 106 | 1.43 | 98.8 | >9950 | ND |
| 111 | 0.0202 | 76.1 | 2.28 | 121 | >9950 | ND |
| 112 | 0.0229 | 93.6 | 2.26 | 107 | >9950 | ND |
| 113 | 0.0331 (0.00385, 3) | 97.9 ± 3.21 | 0.291 (0.0242, 3) | 101 ± 0.880 | >9950 (n=⅓) | ND |
| 114 | 0.0613 | 93.8 | 0.176 | 91.7 | >9950 | ND |
| 115 | 0.103 | 105 | 0.16 | 91.6 | >9950 | ND |
| 116 | 0.137 | 115 | 0.197 | 99.3 | >9950 | ND |
| 117 | 0.0352 | 96.4 | 5.6 | 98.2 | >9950 | ND |
| 118 | 0.0547 | 94.7 | 0.437 | 103 | >9950 | ND |
| 119 | 0.0863 | 103 | 0.351 | 99.4 | >9950 | ND |
| 120 | 0.0866 | 105 | 1.43 | 102 | >9950 | ND |
| 121 | 0.0271 | 92.8 | 8.95 | 106 | >9950 | ND |
| 122 | 0.064 | 105 | 0.41 | 94.3 | >9950 | ND |
| 123 | 0.101 | 94.9 | 0.508 | 96.3 | >9950 | ND |
| 124 | 0.1 | 102 | 1.24 | 93.3 | >9950 | ND |
| 125 | 0.0547 | 94.4 | 2.78 | 103 | >9950 | ND |
| 126 | 0.0472 | 91.8 | 1.69 | 101 | >9950 | ND |
| 127 | 0.027 | 99.3 | 0.762 | 98.5 | >9950 | ND |
| 128 | 0.0232 (0.000862, 3) | 98.5 ± 2.47 | 0.293 (0.0278, 3) | 98.4 ± 4.78 | >9950 (n=⅓) | ND |
| 129 | 0.0248 | 100 | 1.28 | 97.9 | >9950 | ND |
| 130 | 0.0266 (0.00252, 3) | 94.7 ± 4.51 | 0.204 (0.0158, 3) | 100 ± 1.69 | >9950 (n=⅓) | ND |
| 131 | 0.0156 (0.000742, 5) | 96.4 ± 1.95 | 0.190 (0.0152, 6) | 101 ± 2.01 | >9950 (n=⅙) | ND |
| 132 | 0.0208 (0.00119, 4) | 98.3 ± 1.68 | 0.182 (0.0131, 4) | 102 ± 3.32 | >9950 (n=¼) | ND |
| 133 | 0.0180 (0.00101, 5) | 92.7 ± 2.84 | 0.258 (0.0246, 6) | 101 ± 0.993 | >9950 (n=⅕) | ND |
| 134 | 0.0238 (0.00167, 3) | 99.2 ± 3.29 | 0.577 (0.0669, 3) | 106 ± 6.27 | >9950 (n=⅓) | ND |
| 135 | 0.0184 (0.00169, 4) | 92.3 ± 2.64 | 0.271 (0.00688, 5) | 98.4 ± 1.80 | >9950 (n=¼) | ND |
| 136 | 0.00690 (0.000974, 3) | 97.4 ± 4.23 | 0.0918 (0.0102, 3) | 107 ± 4.14 | >9950 (n=⅓) | ND |
| 137 | 0.0116 (0.00151, 3) | 105 ± 3.73 | 0.134 (0.0126, 4) | 99.0 ± 4.03 | >9950 (n=¼) | ND |
| 138 | 0.0197 (0.00311, 3) | 104 ± 2.12 | 0.267 (0.0474, 3) | 101 ± 2.93 | >9950 (n=⅓) | ND |
| 139 | 0.0108 | 99.3 | 0.141 | 111 | >9950 | ND |
| 140 | 0.0121 (0.000610, 3) | 98.5 ± 1.71 | 0.131 (0.00335, 3) | 106 ± 5.31 | >9950 (n=⅓) | ND |
| 141 | 0.00723 (0.000819, 3) | 98.8 ± 1.09 | 0.0693 (0.00248, 4) | 102 ± 2.84 | >9950 (n=¼) | ND |
| 142 | 0.0317 (0.00486, 2) | 98.6 ± 5.71 | 0.322 (0.0246, 2) | 103 ± 6.70 | >9950 (n=½) | ND |
| 143 | 0.022 | 95 | 0.512 | 103 | >9950 | ND |
| 144 | 0.0193 | 90 | 3.47 | 97 | >9950 | ND |
| 145 | 0.0286 | 74.8 | 0.555 | 95.1 | >9950 | ND |
| 146 | 0.0198 | 76.5 | 0.688 | 108 | >9950 | ND |
| 147 | 0.0229 | 98.6 | 0.338 | 93.5 | >9950 | ND |
| 148 | 0.0209 | 98.4 | 1.77 | 94.5 | >9950 | ND |
| 149 | 0.0791 (0.00155, 2) | 104 ± 0.229 | 1.50 (0.0754, 2) | 98.3 ± 0.579 | >9950 (n=½) | ND |
| 150 | 0.0268 (0.00212, 3) | 104 ± 6.96 | 0.455 (0.0582, 4) | 99.8 ± 3.10 | >9950 (n=¼) | ND |
| 151 | 0.0197 (0.00252, 3) | 99.9 ± 4.41 | 0.546 (0.0892, 4) | 102 ± 4.57 | >9950 (n=¼) | ND |
| 152 | 0.0416 (0.000338, 2) | 97.9 ± 3.25 | 3.91 (0.457, 2) | 102 ± 7.89 | >9950 (n=½) | ND |
| 153 | 0.0277 (0.00197, 2) | 97.8 ± 2.74 | 1.10 (0.248, 3) | 91.8 ± 4.63 | >9950 (n=⅓) | ND |
| 154 | 0.0299 (0.00189, 2) | 96.6 ± 3.26 | 1.69 (0.354, 3) | 102 ± 4.07 | >9950 (n=½) | ND |
| 155 | 0.0309 (0.00849, 2) | 96.6 ± 7.55 | 0.912 (0.163, 3) | 99.0 ± 5.16 | >9950 (n=½) | ND |
| 156 | 0.0422 | 89.9 | 4.6 | 110 | >9950 | ND |
| 157 | 0.0286 (0.000896, 2) | 98.8 ± 1.33 | 0.940 (0.206, 3) | 98.5 ± 4.73 | >9950 (n=⅓) | ND |
| 158 | 0.0204 | 93.4 | 0.448 | 87.2 | >9950 | ND |
| 159 | 0.0198 | 95.3 | 0.558 | 89.4 | >9950 | ND |
| 160 | 0.0197 | 101 | 0.228 | 93.6 | >9950 | ND |
| 161 | 0.0207 (0.00167, 3) | 94.6 ± 1.21 | 0.203 (0.00545, 3) | 107 ± 5.29 | >9950 (n=⅓) | ND |
| 162 | 0.022 | 89.7 | 0.327 | 99 | >9950 | ND |
| 163 | 0.0427 | 98.2 | 0.199 | 86.3 | >9950 | ND |
| 164 | 0.0464 (0.00253, 2) | 95.8 ± 5.48 | 0.236 (0.00998, 2) | 93.8 ± 0.298 | >9950 (n=½) | ND |
| 165 | 0.0442 | 96.1 | 0.291 | 94.3 | >9950 | ND |
| 166 | 0.0774 | 97 | 0.192 | 90.3 | >9950 | ND |
| 167 | 0.0534 (0.0163, 2) | 99.5 ± 6.17 | 0.217 (0.00420, 2) | 91.4 ± 3.21 | >9950 (n=½) | ND |
| 168 | 0.0482 | 93 | 0.312 | 93.3 | >9950 | ND |
| 169 | 0.0381 | 96.1 | 1.23 | 100 | >9950 | ND |
| 170 | 0.0244 | 93.9 | 1.03 | 104 | >9950 | ND |
| 171 | 0.0389 | 95.3 | 1.7 | 99.7 | >9950 | ND |
| 172 | 0.0149 (0.000516, 2) | 89.9 ± 1.05 | 0.141 (0.0138, 3) | 99.8 ± 2.93 | >9950 (n=⅓) | ND |
| 173 | 0.0155 (0.00731, 2) | 87.8 ± 6.22 | 0.343 (0.0897, 3) | 89.9 ± 2.72 | >9950 (n=⅓) | ND |
| 174 | 0.0284 | 92.2 | 0.33 | 98.2 | >9950 | ND |
| 175 | 0.0337 | 100 | 0.227 | 91.1 | >9950 | ND |
| 176 | 0.0485 | 89.3 | 0.298 | 98.9 | >9950 | ND |
| 177 | 0.0433 | 113 | 0.178 | 101 | >9950 | ND |
| 178 | 0.11 | 105 | 0.22 | 102 | >9950 | ND |
| 179 | 0.15 | 91 | 0.461 | 99 | >9950 | ND |
| 180 | 0.224 | 86.8 | 0.26 | 99.5 | >9950 | ND |
| 181 | 0.154 | 94.6 | 0.182 | 101 | >9950 | ND |
| 182 | 0.368 | 89 | 0.185 | 96.9 | >9950 | ND |
| 183 | 0.0326 (0.000430, 2) | 93.5 ± 1.46 | 1.37 (0.273, 2) | 93.9 ± 4.99 | >9950 (n=½) | ND |
| 184 | 0.0354 (0.00396, 2) | 95.2 ± 1.13 | 1.82 (0.135, 2) | 96.8 ± 12.0 | >9950 (n=½) | ND |
| 185 | 0.0180 (0.00136, 2) | 94.5 ± 0.288 | 0.419 (0.0758, 2) | 95.1 ± 1.74 | >9950 (n=½) | ND |
| 186 | 0.0274 (0.00339, 2) | 92.7 ± 0.689 | 0.371 (0.0267, 2) | 102 ± 5.53 | >9950 (n=½) | ND |
| 187 | 0.0260 (0.00396, 3) | 101 ± 2.77 | 0.386 (0.0467, 3) | 102 ± 7.10 | >9950 (n=⅓) | ND |
| 188 | 0.0228 (0.00116, 2) | 94.9 ± 1.49 | 0.332 (0.0557, 2) | 96.6 ± 4.28 | >9950 (n=½) | ND |
| 189 | 0.0202 (0.00407, 2) | 96.6 ± 4.38 | 0.280 (0.0253, 2) | 100 ± 3.68 | >9950 (n=½) | ND |
| 190 | 0.0240 (0.00181, 2) | 94.5 ± 0.611 | 0.303 (0.0624, 3) | 98.9 ± 4.64 | >9950 (n=⅓) | ND |
| 191 | 0.0601 (0.00698, 2) | 90.0 ± 3.29 | 0.926 (0.0435, 3) | 98.6 ± 5.09 | >9950 (n=⅓) | ND |
| 192 | 0.0375 (0.00284, 4) | 96.5 ± 4.86 | 0.518 (0.0340, 5) | 100 ± 2.34 | >9950 (n=⅕) | ND |
| 193 | 0.0201 (0.0000166, 2) | 97.2 ± 4.63 | 0.382 (0.0862, 3) | 104 ± 3.84 | >9950 (n=⅓) | ND |
| 194 | 0.0233 (0.00272, 2) | 93.1 ± 1.05 | 0.317 (0.0737, 3) | 103 ± 2.96 | >9950 (n=½) | ND |
| 195 | 0.0219 (0.000744, 2) | 88.5 ± 4.32 | 0.343 (0.0430, 3) | 101 ± 5.39 | >9950 (n=⅓) | ND |
| 196 | 0.0232 (0.00120, 4) | 96.0 ± 2.10 | 0.356 (0.0387, 5) | 96.8 ± 2.59 | >9950 (n=⅕) | ND |
| 197 | 0.0338 (0.00123, 3) | 102 ± 1.85 | 0.336 (0.0398, 4) | 103 ± 3.66 | >9950 (n=¼) | ND |
| 198 | 0.0269 (0.000614, 3) | 94.0 ± 1.17 | 0.362 (0.0292, 4) | 102 ± 2.25 | >9950 (n=¼) | ND |
| 199 | 0.0587 (0.00741, 2) | 96.9 ± 1.48 | 3.20 (1.31, 2) | 96.7 ± 6.69 | >9950 (n=½) | ND |
| 200 | 0.0503 (0.00678, 2) | 96.3 ± 2.76 | 0.834 (0.287, 2) | 93.7 ± 2.72 | >9950 (n=½) | ND |
| 201 | 0.188 (0.0191, 2) | 92.2 ± 3.26 | 0.487 (0.143, 2) | 105 ± 4.51 | >9950 (n=½) | ND |
| 202 | 0.057 | 86 | 0.944 | 92.2 | >9950 | ND |
| 203 | 0.0721 | 106 | 0.535 | 119 | >9950 | ND |
| 204 | 0.0304 | 99.3 | 0.47 | 126 | >9950 | ND |
| 205 | 0.0264 | 101 | 0.287 | 99.6 | >9950 | ND |
| 206 | 0.0204 | 96.4 | 0.299 | 100 | >9950 | ND |
| 207 | 0.019 | 96.2 | 0.209 | 95.1 | >9950 | ND |
| 208 | 0.018 | 94.9 | 0.238 | 101 | >9950 | ND |
| 209 | 0.0133 | 92.7 | 0.235 | 100 | >9950 | ND |
| 210 | 0.02 | 92.1 | 0.57 | 102 | >9950 | ND |
| 211 | 0.0465 | 91.6 | 3.55 | 93.1 | >9950 | ND |
| 212 | 0.0385 | 100 | 0.265 | 94.7 | >9950 | ND |
| 213 | 0.0275 | 92 | 2.14 | 94.8 | >9950 | ND |
| 214 | 0.0351 | 93.7 | 0.618 | 93.2 | >9950 | ND |
| 215 | 0.0437 | 85 | 0.44 | 89.8 | >9950 | ND |
| 216 | 0.0287 | 88.5 | 0.384 | 93.6 | >9950 | ND |
| 217 | 0.0309 | 95.5 | 0.436 | 88 | >9950 | ND |
| 218 | 0.0515 | 90.2 | 0.714 | 92.6 | >9950 | ND |
| 219 | 0.0227 (0.00409, 3) | 96.7 (2.65, 3) | 0.376 (0.0133, 3) | 103 (6.04, 3) | >9950 (n=⅓) | ND |
| 220 | 0.0237 | 91.6 | 0.535 | 87.6 | >9950 | ND |
| 221 | 0.0279 | 81.8 | 1.83 | 83 | >9950 | ND |
| 222 | 0.0195 | 98.7 | 0.518 | 91.6 | >9950 | ND |
| 223 | 0.0252 | 103 | 1.43 | 94 | >9950 | ND |
| 224 | 0.0374 | 109 | 7.51 | 88.4 | >9950 | ND |
| 225 | 0.0466 | 105 | 9.62 | 92.1 | >9950 | ND |
| 226 | 0.0232 | 101 | 0.611 | 101 | >9950 | ND |
| 227 | 0.0224 | 103 | 1.22 | 96.1 | >9950 | ND |
| 228 | 0.0232 | 110 | 1.34 | 91.1 | >9950 | ND |
| 229 | 0.0253 | 103 | 2.25 | 94.3 | >9950 | ND |
| 230 | 0.0199 (0.00457, 2) | 105 (4.33, 2) | 0.726 (0.336, 2) | 90.3 (7.27, 2) | >9950 (n=½) | ND |
| 231 | 0.0184 (0.000100, 2) | 102 (3.90, 2) | 1.22 (0.624, 2) | 107 (0.639, 2) | >9950 (n=½) | ND |
| 232 | 0.0192 | 101 | 0.565 | 103 | >9950 | ND |
| 233 | 0.0269 (0.00700, 2) | 105 (2.26, 2) | 0.604 (0.378, 2) | 111 (1.51, 2) | >9950 (n=½) | ND |
| 234 | 0.0182 | 107 | 0.319 | 112 | >9950 | ND |
| 235 | 0.0168 | 99.3 | 0.295 | 104 | >9950 | ND |
| 236 | 0.0154 (0.000744, 2) | 104 (0.0421, 2) | 0.336 (0.103, 2) | 96.5 (2.64, 2) | >9950 (n=½) | ND |
| 237 | 0.0186 (0.00115, 2) | 102 (0.313, 2) | 0.633 (0.0615, 2) | 102 (2.05, 2) | >9950 (n=½) | ND |
| 238 | 0.0214 (0.00134, 2) | 104 (0.833, 2) | 1.03 (0.378, 2) | 107 (1.17, 2) | >9950 (n=½) | ND |
| 239 | 0.0328 (0.00506, 2) | 104 (5.23, 2) | 0.546 (0.0853, 2) | 101 (4.97, 2) | >9950 (n=½) | ND |
| 240 | 0.0237 (0.000808, 2) | 99.1 (1.18, 2) | 0.508 (0.151, 2) | 98.5 (11.5, 2) | >9950 (n=½) | ND |
| 241 | 0.0213 (0.0000794, 2) | 105 (0.357, 2) | 0.362 (0.0106, 2) | 91.0 (16.3, 2) | >9950 (n=½) | ND |
| 242 | 0.0197 (0.00163, 2) | 100 (8.54, 2) | 0.584 (0.134, 2) | 96.3 (3.81, 2) | >9950 (n=½) | ND |
| 243 | 0.0154 (0.00300, 3) | 101 (6.26, 3) | 0.860 (0.294, 3) | 93.2 (4.52, 3) | >9950 (n=⅓) | ND |
| 244 | 0.0218 (0.00545, 3) | 101 (3.95, 3) | 2.25 (1.04, 3) | 104 (3.83, 3) | >9950 (n=⅓) | ND |
| 245 | 0.0195 (0.00407, 3) | 96.7 (3.74, 3) | 1.88 (0.824, 3) | 88.9 (8.09, 3) | >9950 (n=⅓) | ND |
| 246 | 0.0223 (0.00101, 4) | 96.9 (2.89, 4) | 0.441 (0.0598, 4) | 102 (1.52, 4) | >9950 (n=¼) | ND |
| 247 | 0.0220 (0.000585, 2) | 103 (1.70, 2) | 1.00 (0.641, 2) | 108 (0.981, 2) | >9950 (n=½) | ND |
| 248 | 0.0176 (0.00189, 2) | 99.2 (1.51,2) | 0.537 (0.130, 2) | 89.1 (7.08, 2) | >9950 (n=½) | ND |
| 249 | 0.0201 | 108 | 0.300 (0.0349, 2) | 101 (6.23, 2) | >9950 | ND |
| 250 | 0.021 | 102 | 0.414 (0.126, 2) | 114 (4.93, 2) | >9950 | ND |
| 251 | 0.0305 | 107 | 0.338 (0.0109, 2) | 99.0 (7.31, 2) | >9950 | ND |
| 252 | 0.049 | 109 | 0.555 (0.102, 2) | 115 (4.34, 2) | >9950 | ND |
| 253 | 0.0295 (0.00329, 2) | 101 (3.43, 2) | 0.430 (0.0422, 2) | 113 (3.67, 2) | >9950 (n=½) | ND |
| 254 | 0.0273 (0.000844, 2) | 98.2 (5.88, 2) | 0.507 (0.101, 2) | 103 (4.62, 2) | >9950 (n=½) | ND |
| 255 | 0.0213 | 103 | 0.357 | 103 | >9950 | ND |
| 256 | 0.0175 | 97.7 | 0.249 | 95.4 | >9950 | ND |
| 257 | 0.148 | 90.3 | 2.03 | 82 | >9950 | ND |
| 258 | 0.0473 | 90.3 | 0.653 | 94.9 | >9950 | ND |
| 259 | 0.0198 | 111 | 0.362 (0.0362, 2) | 99.5 (5.41, 2) | >9950 | ND |
| 260 | 0.0239 | 113 | 0.547 (0.0453, 2) | 108 (2.42, 2) | >9950 | ND |
| 261 | 0.025 | 105 | 0.531 (0.00408, 2) | 97.9 (1.27, 2) | >9950 | ND |
| 262 | 0.0327 | 89.8 | 0.472 (0.00490, 2) | 105 (5.10, 2) | >9950 | ND |
| 263 | 0.0214 | 88.6 | 0.294 (0.000357, 2) | 98.5 (5.68, 2) | >9950 | ND |
| 264 | 0.0208 | 114 | 0.413 (0.0548, 2) | 113 (1.32, 2) | >9950 | ND |
| 265 | 0.0145 (0.000696, 2) | 100 (1.69, 2) | 0.262 (0.0581, 2) | 99.8 (5.27, 2) | >9950 (n=½) | ND |
| 266 | 0.0136 (0.0000240, 2) | 93.2 (8.75, 2) | 0.282 (0.0352, 2) | 90.5 (17.9, 2) | >9950 (n=½) | ND |
| 267 | 0.0162 (0.000222, 2) | 104 (6.11,2) | 0.271 (0.0367, 2) | 103 (0.674, 2) | >9950 (n=½) | ND |
| 268 | 0.0265 | 102 | 0.613 | 112 | >9950 | ND |
| 269 | 0.0335 (0.00245, 2) | 95.3 (4.18, 2) | 1.72 (1.17, 2) | 96.5 (7.69, 2) | >9950 (n=½) | ND |
| 270 | 0.0567 | 91.7 | 0.551 | 97 | >9950 | ND |
| 271 | 0.0186 | 98.6 | 0.494 | 101 | >9950 | ND |
| 272 | 0.0264 | 86 | 0.388 | 99.9 | >9950 | ND |
| 273 | 0.0166 | 100 | 2.08 | 103 | >9950 | ND |
| 274 | 0.0226 | 103 | 0.406 | 114 | >9950 | ND |
| 275 | 0.0152 | 104 | 0.737 | 110 | >9950 | ND |
| 276 | 0.0134 | 102 | 0.49 | 103 | >9950 | ND |
| 277 | 0.0176 (0.000579, 2) | 107 (2.27, 2) | 0.225 (0.0241, 2) | 97.1 (0.819, 2) | >9950 (n=½) | ND |
| 278 | 0.0173 (0.000584, 2) | 105 (0.0609, 2) | 0.290 (0.0314, 2) | 109 (3.42, 2) | >9950 (n=½) | ND |
| 279 | 0.0305 | 103 | 0.406 | 112 | >9950 | ND |
| 280 | 0.0229 | 105 | 0.346 | 106 | >9950 | ND |
| 281 | 0.0187 | 110 | 0.252 | 100 | >9950 | ND |
| 282 | 0.0193 | 100 | 0.216 | 97.1 | >9950 | ND |
| 283 | 0.073 | 107 | 1.14 | 108 | >9950 | ND |
| 284 | 0.0389 | 98.3 | 0.505 | 110 | >9950 | ND |
| 285 | 0.0115 | 101 | 1.21 | 102 | >9950 | ND |
| 286 | 0.0344 | 108 | 0.678 | 110 | >9950 | ND |
| 287 | 0.0189 | 93 | 0.563 | 97.2 | >9950 | ND |
| 288 | 0.0219 | 110 | 0.354 | 103 | >9950 | ND |
| 289 | 0.017 | 111 | 0.731 | 96.7 | >9950 | ND |
| 290 | 0.0188 | 103 | 0.324 | 101 | >9950 | ND |
| 291 | 0.012 | 99.6 | 0.207 | 97.6 | >9950 | ND |
| 292 | 0.00620 (0.000221, 5) | 101 (2.00, 5) | 0.0758 (0.00345, 5) | 104 (1.25, 5) | >9950 (n=⅕) | ND |
| 293 | 0.00915 (0.00192, 3) | 102 (0.983, 3) | 0.102 (0.00688, 3) | 102 (1.78, 3) | >9950 (se=20.5, n=⅔) | ND |
| 294 | 0.00615 | 105 | 0.0665 | 106 | >9950 | ND |
| 295 | 0.0141 | 104 | 0.167 | 109 | >9950 | ND |
| 296 | 0.0121 | 100 | 0.108 | 109 | >9950 | ND |
| 297 | 0.0112 | 103 | 0.125 | 108 | >9950 | ND |
| 298 | 0.0107 (0.00103, 3) | 97.4 (2.75, 3) | 0.190 (0.0493, 3) | 106 (2.35, 3) | >9950 (n=⅓) | ND |
| 299 | 0.0104 (0.00202, 3) | 101 (4.84, 3) | 0.126 (0.0217, 3) | 103 (3.15, 3) | >9950 (n=⅓) | ND |
| 300 | 0.0128 (0.000753, 3) | 102 (1.14, 3) | 0.194 (0.00146, 3) | 107 (2.29, 3) | >9950 (n=⅓) | ND |
| 301 | 0.0128 (0.000550, 2) | 97.4 (2.71, 2) | 0.175 (0.0218, 2) | 99.2 (3.94, 2) | >9950 (n=½) | ND |
| 302 | 0.00916 (0.00192, 2) | 100 (2.39, 2) | 0.0917 (0.00850, 2) | 103 (0.561, 2) | >9950 (n=½) | ND |
| 303 | 0.0178 | 100 | 0.389 | 102 | >9950 | ND |
| 304 | 0.047 | 110 | 0.474 | 101 | >9950 | ND |
| 305 | 0.0289 | 105 | 0.629 | 92.7 | >9950 | ND |
| 306 | 0.0227 | 102 | 0.414 | 105 | >9950 | ND |
| 307 | 0.0292 | 105 | 0.376 | 101 | >9950 | ND |
| 308 | 0.0551 | 117 | 0.689 | 98 | >9950 | ND |
| 309 | 0.0212 | 107 | 0.527 | 104 | >9950 | ND |
| 310 | 0.0250 (0.00750, 2) | 99.9 (0.909, 2) | 0.347 (0.00203, 2) | 105 (1.16, 2) | >9950 (n=½) | ND |
| 311 | 0.0243 | 105 | 0.791 | 110 | >9950 | ND |
| 312 | 0.00757 | 105 | 0.663 | 104 | >9950 | ND |
| 313 | 0.00781 | 101 | 1.13 | 98.6 | >9950 | ND |
| 314 | 0.0216 | 100 | 0.673 | 104 | >9950 | ND |
| 315 | 0.0245 (0.000567, 2) | 108 (2.95, 2) | 0.376 (0.0331, 2) | 98.9 (6.60, 2) | >9950 (n=½) | ND |
| 316 | 0.0316 (0.00498, 2) | 103 (2.75, 2) | 0.571 (0.0402, 2) | 109 (0.715, 2) | >9950 (n=½) | ND |
| 317 | 0.0587 | 112 | 1.34 | 101 | >9950 (n=½) | ND |
| 318 | 0.0402 (0.0122, 3) | 106 (5.44, 3) | 0.219 (0.00541, 3) | 99.9 (2.22, 3) | >9950 (n=⅓) | ND |
| 319 | 0.0196 (0.00610, 3) | 98.1 (2.58, 3) | 0.180 (0.00678, 2) | 100 (4.36, 2) | >9950 (n=⅓) | ND |
| 320 | 0.0144 (0.00517, 2) | 94.2 (0.879, 2) | 0.246 (0.0335, 2) | 101 (5.01, 2) | >9950 (n=½) | ND |
| 321 | 0.0107 (0.00388, 2) | 108 (0.116, 2) | 0.295 (0.0332, 2) | 102 (1.81, 2) | >9950 (n=½) | ND |
| 322 | 0.00937 (0.00109, 6) | 101 (1.47, 6) | 0.144 (0.0108, 6) | 100 (1.87, 6) | >9950 (n=⅙) | ND |
| 323 | 0.00793 | 101 | 0.203 | 92.6 | >9950 | ND |
| 324 | 0.00632 (0.000630, 6) | 101 (2.01, 6) | 0.0647 (0.00427, 6) | 97.6 (3.15, 6) | >9950 (n=⅙) | ND |
| 325 | 0.0485 (0.0145, 3) | 104 (1.22, 3) | 0.225 (0.0687, 3) | 97.8 (1.80, 3) | >9950 (n=⅓) | ND |
| 326 | 0.0338 (0.0137, 3) | 102 (3.35, 3) | 0.186 (0.00851, 3) | 94.4 (4.49, 3) | >9950 (n=⅓) | ND |
| 327 | 0.0180 (0.00855, 2) | 105 (2.94, 2) | 0.211 (0.0578, 2) | 105 (1.05, 2) | >9950 (n=½) | ND |
| 328 | 0.00973 | 106 | 0.405 | 99.6 | >9950 | ND |
| 329 | 0.015 | 109 | 0.353 | 104 | >9950 | ND |
| 330 | 0.0185 | 112 | 0.477 | 103 | >9950 | ND |
| 331 | 0.0113 | 101 | 0.436 | 99.6 | >9950 | ND |
| 332 | 0.0109 | 107 | 0.263 | 114 | >9950 | ND |
| 333 | 0.0062 | 109 | 0.388 | 107 | >9950 | ND |
| 334 | 0.00987 (0.00114, 6) | 103 (2.09, 6) | 0.131 (0.0111, 6) | 104 (2.98, 6) | >9950 (n=⅙) | ND |
| 335 | 0.00871 | 107 | 0.175 | 113 | >9950 | ND |
| 336 | 0.0136 (0.00163, 4) | 109 (3.29, 4) | 0.338 (0.0360, 4) | 107 (4.12, 4) | >10100 (n=¼) | ND |
| 337 | 0.0151 (0.00142, 4) | 103 (4.79, 4) | 0.444 (0.0734, 4) | 107 (3.72, 4) | >10100 (n=¼) | ND |
| 338 | 0.0157 (0.000927, 4) | 104 (2.93, 4) | 0.468 (0.0280, 4) | 109 (4.09, 4) | >10100 (n=¼) | ND |
| 339 | 0.0190 (0.00238, 4) | 106 (3.70, 4) | 0.308 (0.0377, 4) | 113 (6.21, 4) | >10100 (n=¼) | ND |
| 340 | 0.0206 | 95.2 | 0.409 | 105 | >9950 | ND |
| 341 | 0.0127 (0.00156, 2) | 91.4 (2.36, 2) | 0.329 (0.00763, 2) | 99.9 (1.08, 2) | >9950 (n=½) | ND |
| 342 | 0.0105 (0.000707, 4) | 106 (4.47, 4) | 0.191 (0.0245, 4) | 113 (5.23, 4) | >10100 (n=¼) | ND |
| 343 | 0.0111 | 98.8 | 0.275 | 104 | >9950 | ND |
| 344 | 0.0174 | 97.9 | 0.336 | 100 | >9950 | ND |
| 345 | 0.0147 (0.000586, 2) | 98.9 (1.25, 2) | 0.285 (0.0205, 2) | 105 (3.05, 2) | >9950 (n=½) | ND |
| 346 | 0.0194 | 96.6 | 0.329 | 107 | >9950 | ND |
| 347 | 0.0259 | 98 | 0.356 | 103 | >9950 | ND |
| 348 | 0.0228 | 95.9 | 0.805 | 99.9 | >9950 | ND |
| 349 | 0.015 | 95.9 | 0.334 | 99 | >9950 | ND |
| 350 | 0.0288 | 101 | 0.202 | 95.9 | >9950 | ND |
| 351 | 0.0185 | 102 | 0.397 | 100 | >9950 | ND |
| 352 | 0.0106 | 98.3 | 0.262 | 99.5 | >9950 | ND |
| 353 | 0.0249 | 98.2 | 0.203 | 98 | >9950 | ND |
| 354 | 0.0249 | 95.4 | 0.505 | 99.9 | >9950 | ND |
| 355 | 0.0365 | 101 | 0.574 | 105 | >9950 | ND |
| 356 | 0.0488 | 96.2 | 0.936 | 101 | >9950 | ND |
| 357 | 0.0110 (0.00125, 4) | 99.9 (5.05, 4) | 0.649 (0.130, 4) | 107 (2.67, 4) | >10100 (n=¼) | ND |
| 358 | 0.0137 (0.000651, 4) | 99.6 (4.03, 4) | 0.773 (0.119, 4) | 107 (3.82, 4) | >10100 (n=¼) | ND |
| 359 | 0.0261 (0.00304, 4) | 103 (4.28, 4) | 1.18 (0.164, 4) | 104 (5.15, 4) | >10100 (n=¼) | ND |
| 360 | 0.0121 (0.00106, 2) | 106 (1.70, 2) | 0.301 (0.0234, 2) | 89.8 (0.316, 2) | >9950 (n=½) | ND |
| 361 | 0.0121 (0.00279, 2) | 107 (0.508, 2) | 0.580 (0.0801, 2) | 98.2 (2.23, 2) | >9950 (n=½) | ND |
| 362 | 0.0131 (0.000845, 4) | 107 (1.67, 4) | 0.340 (0.0419, 4) | 109 (2.00, 4) | >10100 (n=¼) | ND |
| 363 | 0.0183 | 111 | 0.34 | 108 | >9950 | ND |
| 364 | 0.0111 | 101 | 0.347 | 107 | >9950 | ND |
| 365 | 0.00809 | 105 | 0.362 | 98.5 | >9950 | ND |
| 366 | 0.0162 (0.00214, 2) | 108 (3.61, 2) | 0.279 (0.0415, 2) | 89.6 (8.49, 2) | >9950 (n=½) | ND |
| 367 | 0.019 | 112 | 0.366 | 93.9 | >9950 | ND |
| 368 | 0.0271 | 105 | 0.411 | 103 | >9950 | ND |
| 369 | 0.037 | 102 | 0.555 | 99.1 | >9950 | ND |
| 370 | 0.0282 | 105 | 0.402 | 112 | >9950 | ND |
| 371 | 0.0209 | 102 | 0.363 | 112 | >9950 | ND |
| 372 | 0.0112 | 97.3 | 0.291 | 108 | >9950 | ND |
| 373 | 0.0152 | 101 | 0.329 | 101 | >9950 | ND |
| 374 | 0.0135 | 96.2 | 0.269 | 106 | >9950 | ND |
| 375 | 0.0566 | 100 | 1.11 | 106 | >9950 | ND |
| 376 | 0.0281 | 99.8 | 0.539 | 104 | >9950 | ND |
| 377 | 0.0205 | 92.8 | 0.356 | 100 | >9950 | ND |
| 378 | 0.0132 (0.00169, 2) | 93.5 (2.41, 2) | 0.166 (0.00187, 2) | 98.9 (2.96, 2) | >9950 (n=½) | ND |
| 379 | 0.0167 (0.00194, 2) | 97.5 (1.50, 2) | 0.171 (0.0104, 2) | 104 (5.78, 2) | >9950 (n=½) | ND |
| 380 | 0.0209 (0.00237, 2) | 100 (3.53, 2) | 0.176 (0.0372, 2) | 96.2 (1.96, 2) | >9950 (n=½) | ND |
| 381 | 0.0784 | 101 | 1.1 | 105 | >9950 | ND |
| 382 | 0.0302 | 97.6 | 0.619 | 101 | >9950 | ND |
| 383 | 0.0147 (0.00111, 2) | 100 (1.51,2) | 0.306 (0.0408, 2) | 105 (4.16, 2) | >9950 (n=½) | ND |
| 384 | 0.0124 (0.000559, 2) | 94.5 (3.49, 2) | 0.308 (0.0612, 2) | 98.2 (1.53, 2) | >9950 (n=½) | ND |
| 385 | 0.0154 (0.00229, 2) | 95.2 (1.73, 2) | 0.189 (0.0226, 2) | 100 (4.42, 2) | >9950 (n=½) | ND |
| 386 | 0.0174 (0.00148, 2) | 95.7 (4.77, 2) | 0.194 (0.00360, 2) | 98.9 (5.82, 2) | >9950 (n=½) | ND |
| 387 | 0.0137 (0.0000708, 2) | 102 (3.23, 2) | 0.320 (0.125, 2) | 101 (1.61, 2) | >9950 (n=½) | ND |
| 388 | 0.0103 | 98.3 | 0.292 | 95.4 | >9950 | ND |
| 389 | 0.0178 (0.000953, 2) | 94.6 (0.800, 2) | 0.190 (0.00883, 2) | 92.4 (0.872, 2) | >9950 (n=½) | ND |
| 390 | 0.0187 (0.00223, 3) | 103 (1.73, 3) | 0.209 (0.00349, 3) | 97.7 (0.126, 3) | >9950 (n=⅓) | ND |
| 391 | 0.0101 (0.000893, 4) | 101 (2.26, 4) | 0.167 (0.0161, 4) | 109 (0.750, 4) | >9950 (n=¼) | ND |
| 392 | 0.0107 | 94.4 | 0.521 | 97.9 | >9950 | ND |
| 393 | 0.0115 | 94.3 | 0.372 | 96.8 | >9950 | ND |
| 394 | 0.0179 (0.00421, 2) | 97.7 (4.16, 2) | 0.223 (0.0106, 2) | 101 (2.99, 2) | >9950 (n=½) | ND |
| 395 | 0.0127 | 93.1 | 0.377 | 90.8 | >9950 | ND |
| 396 | 0.0113 | 96.2 | 0.291 | 107 | >9950 | ND |
| 397 | 0.0293 (0.0179, 2) | 94.6 (2.83, 2) | 0.166 (0.0101, 2) | 95.8 (4.65, 2) | >9950 (n=½) | ND |
| 398 | 0.0166 (0.000570, 2) | 97.4 (0.108, 2) | 0.215 (0.0107, 2) | 101 (5.97, 2) | >9950 (n=½) | ND |
| 399 | 0.0186 | 98.4 | 0.259 | 91.9 | >9950 | ND |
| 400 | 0.0821 | 98.1 | 0.708 | 108 | >9950 | ND |
| 401 | 0.0112 (0.00138, 3) | 98.9 (1.97, 3) | 0.235 (0.00554, 3) | 104 (7.95, 3) | >9950 (n=⅓) | ND |
| 402 | 0.0132 (0.00118, 3) | 98.9 (2.45, 3) | 0.221 (0.0238, 3) | 107 (4.31, 3) | >9950 (n=⅓) | ND |
| 403 | 0.00939 (0.000448, 3) | 98.1 (1.21, 3) | 0.175 (0.00248, 2) | 108 (0.362, 2) | >9950 (n=⅓) | ND |
| 404 | 0.014 | 101 | 0.632 | 94.3 | >9950 | ND |
| 405 | 0.0209 | 100 | 1.26 | 93.3 | >9950 | ND |
| 406 | 0.00896 (0.000684, 2) | 101 (2.15, 2) | 0.351 (0.0303, 2) | 98.5 (5.32, 2) | >9950 (n=½) | ND |
| 407 | 0.0114 (0.00120, 3) | 99.2 (1.86, 3) | 0.156 (0.00731, 3) | 100 (2.08, 3) | >9950 (n=⅓) | ND |
| 408 | 0.00888 (0.000279, 3) | 99.7 (1.81, 3) | 0.227 (0.0140, 3) | 102 (2.46, 3) | >9950 (n=⅓) | ND |
| 409 | 0.00928 (0.000716, 3) | 99.2 (0.111, 3) | 0.188 (0.0149, 3) | 103 (0.304, 3) | >9950 (n=⅓) | ND |
| 410 | 0.0118 (0.000492, 2) | 99.1 (1.74, 2) | 0.251 (0.147, 2) | 94.0 (4.37, 2) | >9950 (n=½) | ND |
| 411 | 0.0102 (0.00112, 3) | 101 (0.677, 3) | 0.167 (0.00866, 3) | 110 (5.40, 3) | >9950 (n=⅓) | ND |
| 412 | 0.0108 (0.00119, 3) | 95.4 (0.413, 3) | 0.160 (0.00954, 3) | 108 (2.23, 3) | >9950 (n=⅓) | ND |
| 413 | 0.0146 (0.00126, 3) | 101 (1.34, 3) | 0.234 (0.0297, 3) | 96.9 (5.28, 3) | >9950 (n=⅓) | ND |
| 414 | 0.00961 (0.000457, 4) | 98.4 (1.10, 4) | 0.119 (0.00178, 4) | 103 (1.77, 4) | >9950 (n=¼) | ND |
| 415 | 0.00991 (0.000319, 4) | 101 (0.864, 4) | 0.122 (0.00605, 4) | 109 (0.830, 4) | >9950 (n=¼) | ND |
| 416 | 0.0214 (0.000620, 3) | 99.0 (2.74, 3) | 0.332 (0.0140, 3) | 104 (1.88, 3) | >9950 (n=⅓) | ND |
| 417 | 0.00651 (0.000543, 4) | 101 (3.45, 4) | 0.0675 (0.00545, 4) | 109 (2.32, 4) | >9950 (n=¼) | ND |
| 418 | 0.00599 (0.000221, 3) | 91.0 (4.24, 3) | 0.0603 (0.00801, 3) | 93.7 (3.72, 3) | >9950 (n=⅓) | ND |
| 419 | 0.00958 (0.00102, 3) | 101 (2.60, 3) | 0.132 (0.0105, 3) | 113 (4.86, 3) | >9950 (n=⅓) | ND |
| 420 | 0.00964 (0.000804, 2) | 101 (0.422, 2) | 0.123 (0.0177, 2) | 99.7 (2.76, 2) | >9950 (n=½) | ND |
| 421 | 0.00618 (0.000456, 5) | 100 (4.89, 5) | 0.0570 (0.00402, 5) | 101 (4.19, 5) | >9950 (n=⅕) | ND |
| 422 | 0.00655 (0.000179, 5) | 104 (3.27, 5) | 0.0729 (0.00508, 5) | 106 (4.97, 5) | >9950 (n=⅕) | ND |
| 423 | 0.00658 (0.000673, 5) | 104 (2.28, 5) | 0.0721 (0.00530, 5) | 105 (3.34, 5) | >9950 (n=⅕) | ND |
| 424 | 0.00502 (0.000436, 5) | 101 (3.60, 5) | 0.0427 (0.00649, 5) | 102 (4.22, 5) | >9950 (n=⅕) | ND |
| 425 | 0.00943 (0.000670, 2) | 97.6 (2.09, 2) | 0.0965 (0.000509, 2) | 108 (1.41, 2) | >9950 (n=½) | ND |
| 426 | 0.0191 | 93.3 | 0.206 | 97.2 | >9950 (n=½) | ND |
| 427 | 0.0132 (0.000467, 2) | 95.9 (0.131, 2) | 0.206 (0.000352, 2) | 109 (1.69, 2) | >9950 (n=½) | ND |
| 428 | 0.00797 (0.000657, 2) | 95.5 (1.18, 2) | 0.102 (0.00942, 2) | 106 (2.33, 2) | >9950 (n=½) | ND |
| 429 | 0.00799 (0.000619, 2) | 108 (1.47, 2) | 0.116 (0.0211, 2) | 116 (8.54, 2) | >9950 (n=½) | ND |
| 430 | 0.0175 (0.00305, 2) | 107 (3.65, 2) | 0.342 (0.0582, 2) | 93.1 (9.40, 2) | >9950 (n=½) | ND |
| 431 | 0.00970 (0.000165, 2) | 104 (2.51, 2) | 0.134 (0.0264, 2) | 99.2 (5.72, 2) | >9950 (n=½) | ND |
| 432 | 0.00602 (0.000709, 5) | 103 (4.98, 5) | 0.0549 (0.00308, 5) | 106 (5.75, 5) | >9950 (n=⅕) | ND |
| 433 | 0.00972 (0.000248, 3) | 94.0 (6.04, 3) | 0.128 (0.00910, 3) | 102 (3.73, 3) | >9950 (n=⅓) | ND |
| 434 | 0.00704 (0.000555, 5) | 98.3 (4.47, 5) | 0.0837 (0.00431, 5) | 104 (4.56, 5) | >9950 (n=⅕) | ND |
| 435 | 0.00517 (0.000107, 5) | 104 (5.02, 5) | 0.0527 (0.00123, 5) | 111 (2.21, 5) | >9950 (n=⅕) | ND |
| 436 | 0.00714 (0.000579, 3) | 102 (0.413, 3) | 0.102 (0.00751, 3) | 98.9 (3.69, 3) | >9950 (n=⅓) | ND |
| 437 | 0.0146 (0.000707, 2) | 94.8 (7.99, 2) | 0.249 (0.0290, 2) | 89.2 (2.76, 2) | >9950 (n=½) | ND |
| 438 | 0.0157 (0.00257, 2) | 98.9 (3.64, 2) | 0.471 (0.0582, 2) | 88.5 (0.533, 2) | >9950 (n=½) | ND |
| 439 | 0.00799 (0.000558, 3) | 96.0 (3.26, 3) | 0.110 (0.0145, 3) | 95.7 (2.01, 3) | >9950 (n=⅓) | ND |
| 440 | 0.0104 (0.000447, 6) | 102 (1.92, 6) | 0.180 (0.0111, 6) | 107 (2.68, 6) | >10100 (n=⅙) | ND |
| 441 | 0.0174 (0.00153, 4) | 97.2 (0.594, 4) | 0.134 (0.0135, 4) | 110(4.43, 4) | >9950 (n=¼) | ND |
| 442 | 0.0129 (0.000387, 3) | 101 (1.37, 3) | 0.285 (0.0824, 3) | 113 (7.08, 3) | >9950 (n=⅓) | ND |
| 443 | 0.0178 (0.00241, 2) | 102 (1.04, 2) | 0.294 (0.00644, 2) | 114 (3.48, 2) | >9950 (n=½) | ND |
| 444 | 0.0157 (0.00115, 2) | 93.6 (7.04, 2) | 0.289 (0.00144, 2) | 106 (8.34, 2) | >9950 (n=½) | ND |
| 445 | 0.00728 (0.000110, 2) | 102 (1.47, 2) | 0.0781 (0.00635, 2) | 103 (1.23, 2) | >9950 (n=½) | ND |
| 446 | 0.0164 (0.000887, 3) | 105 (4.26, 3) | 0.162 (0.00890, 3) | 103 (5.00, 3) | >9950 (n=⅓) | ND |
| 447 | 0.0170 (0.00248, 3) | 102 (7.41, 3) | 0.219 (0.0213, 3) | 105 (4.10, 3) | >9950 (n=⅓) | ND |
| 448 | 0.0164 (0.00151, 3) | 105 (3.52, 3) | 0.157 (0.0114, 3) | 104 (1.69, 3) | >9950 (n=⅓) | ND |
| 449 | 0.0102 (0.000548, 5) | 101 (1.21, 5) | 0.160 (0.0159, 5) | 112 (2.67, 5) | >9950 (n=⅕) | ND |
| 450 | 0.0138 (0.000576, 5) | 103 (1.18, 5) | 0.201 (0.0102, 5) | 120 (3.81, 5) | >9950 (n=⅕) | ND |
| 451 | 0.0113 (0.000589, 5) | 101 (2.33, 5) | 0.172 (0.00777, 5) | 118 (3.25, 5) | >9950 (n=⅕) | ND |
| 452 | 0.0192 (0.00110, 3) | 102 (1.68, 3) | 0.259 (0.0104, 3) | 117 (1.07, 3) | >9950 (n=⅓) | ND |
| 453 | 0.0139 (0.00141, 5) | 101 (1.94, 5) | 0.200 (0.00941, 5) | 116 (3.41, 5) | >9950 (n=⅕) | ND |
| 454 | 0.0202 (0.00176, 4) | 101 (1.53, 4) | 0.266 (0.00975, 4) | 114 (3.68, 4) | >9950 (n=¼) | ND |
| 455 | 0.0146 (0.00112, 5) | 104 (1.34, 5) | 0.219 (0.0123, 5) | 117 (2.80, 5) | >9950 (n=⅕) | ND |
| 456 | 0.0236 (0.00188, 3) | 101 (2.59, 3) | 0.341 (0.0277, 3) | 116 (0.822, 3) | >9950 (n=⅓) | ND |
| 457 | 0.0106 (0.00217, 4) | 106 (3.22, 4) | 0.185 (0.0580, 4) | 119 (4.53, 4) | >9950 (n=¼) | ND |
| 458 | 0.0121 (0.000899, 4) | 101 (3.63, 4) | 0.179 (0.0147, 4) | 111 (4.25, 4) | >9950 (n=¼) | ND |
| 459 | 0.0130 (0.00287, 4) | 106 (3.71, 4) | 0.180 (0.0192, 4) | 120 (4.73, 4) | >9950 (n=¼) | ND |
| 460 | 0.0108 (0.00140, 4) | 102 (2.05, 4) | 0.187 (0.0213, 4) | 111 (2.78, 4) | >9950 (n=¼) | ND |
| 461 | 0.0103 (0.000757, 4) | 100 (3.07, 4) | 0.173 (0.0146, 4) | 108 (0.909, 4) | >10100 (n=¼) | ND |
| 462 | 0.0128 (0.00203, 3) | 99.3 (3.59, 3) | 0.189 (0.00876, 3) | 113 (7.43, 3) | >9950 (n=⅓) | ND |
| 463 | 0.0124 (0.00111, 3) | 91.4 (3.32, 3) | 0.267 (0.0917, 3) | 111 (4.12, 3) | >9950 (n=⅓) | ND |
| 464 | 0.00955 (0.000825, 4) | 99.7 (1.97, 4) | 0.161 (0.00664, 4) | 114 (4.40, 4) | >10100 (n=¼) | ND |
| 465 | 0.0174 (0.00309, 3) | 94.9 (2.15, 3) | 0.413 (0.0329, 3) | 98.6 (1.80, 3) | >9950 (n=⅓) | ND |
| 466 | 0.00971 (0.000114, 2) | 98.8 (0.994, 2) | 0.156 (0.00268, 2) | 105 (1.96, 2) | >10100 (n=½) | ND |
| 467 | 0.0113 (0.00170, 2) | 102 (4.24, 2) | 0.131 (0.00641, 2) | 110 (3.61, 2) | >10100 (n=½) | ND |
| 468 | 0.00991 (0.000823, 2) | 97.1 (2.96, 2) | 0.168 (0.00905, 2) | 109 (3.35, 2) | >10100 (n=½) | ND |
| 469 | 0.0121 (0.00130, 2) | 102 (1.70, 2) | 0.161 (0.00141, 2) | 111 (1.47, 2) | >9950 (n=½) | ND |
| 470 | 0.0103 (0.00167, 2) | 104 (7.15, 2) | 0.127 (0.00754, 2) | 112 (1.75, 2) | >9950 (n=½) | ND |
| 471 | 0.0107 (0.000902, 2) | 101 (5.62, 2) | 0.143 (0.0220, 2) | 112 (0.242, 2) | >9950 (n=½) | ND |
| 472 | 0.0131 (0.00159, 2) | 108 (3.90, 2) | 0.154 (0.0130, 2) | 118 (0.770, 2) | >9950 (n=½) | ND |
| 473 | 0.0163 (0.00190, 2) | 106 (3.37, 2) | 0.192 (0.0132, 2) | 118 (4.95, 2) | >9950 (n=½) | ND |
| 474 | 0.0106 (0.00162, 2) | 107 (1.06, 2) | 0.123 (0.0104, 2) | 113 (3.38, 2) | >9950 (n=½) | ND |
| 475 | 0.0120 (0.000617, 2) | 106 (2.22, 2) | 0.143 (0.0302, 2) | 116 (1.92, 2) | >9950 (n=½) | ND |
| 476 | 0.00886 (0.00204, 2) | 103 (0.456, 2) | 0.117 (0.0135, 2) | 114 (1.14, 2) | >9950 (n=½) | ND |
| 477 | 0.00861 (0.00132, 2) | 102 (1.19, 2) | 0.143 (0.0278, 2) | 110 (1.47, 2) | >9950 (n=½) | ND |
| 478 | 0.0139 | 93.9 | 0.322 | 109 | >9950 | ND |
| 479 | 0.00718 | 107 | 0.115 | 101 | >9950 | ND |
| 480 | 0.00955 | 102 | 0.124 | 120 | >9950 | ND |
| 481 | 0.0181 | 97.9 | 0.279 | 111 | >9950 | ND |
| 482 | 0.0158 (0.00283, 2) | 103 (2.04, 2) | 0.169 (0.00139, 2) | 118 (0.635, 2) | >9950 (n=½) | ND |
| 483 | 0.0138 (0.0000352, 2) | 97.4 (1.31, 2) | 0.169 (0.0278, 2) | 118 (4.57, 2) | >9950 (n=½) | ND |
| 484 | 0.0136 (0.00267, 2) | 102 (2.16, 2) | 0.170 (0.00710, 2) | 118 (0.624, 2) | >9950 (n=½) | ND |
| 485 | 0.0113 (0.000946, 2) | 106 (6.69, 2) | 0.153 (0.00444, 2) | 115 (0.806, 2) | >10100 (n=½) | ND |
| 486 | 0.0143 (0.00116, 2) | 94.1 (4.47, 2) | 0.166 (0.00560, 2) | 108 (0.513, 2) | >9950 (n=½) | ND |
| 487 | 0.0161 (0.00374, 2) | 103 (4.77, 2) | 0.199 (0.0396, 2) | 116 (5.51, 2) | >9950 (n=½) | ND |
| 488 | 0.0115 (0.00121, 5) | 104 (2.35, 5) | 0.207 (0.0233, 5) | 113 (2.17, 5) | >10100 (n=⅕) | ND |
| 489 | 0.0131 (0.000283, 3) | 103 (2.46, 3) | 0.257 (0.0330, 3) | 112 (5.59, 3) | >10100 (n=⅓) | ND |
| 490 | 0.0122 (0.00221, 2) | 110 (0.557, 2) | 0.143 (0.0153, 2) | 115 (3.29, 2) | >9950 (n=½) | ND |
| 491 | 0.0148 (0.00265, 2) | 100 (2.79, 2) | 0.148 (0.00935, 2) | 119 (2.42, 2) | >9950 (n=½) | ND |
| 492 | 0.0125 (0.00109, 4) | 101 (4.03, 4) | 0.143 (0.0174, 4) | 117 (2.36, 4) | >9950 (n=¼) | ND |
| 493 | 0.0155 (0.000342, 2) | 105 (1.97, 2) | 0.184 (0.0219, 2) | 126 (3.27, 2) | >9950 (n=½) | ND |
| 494 | 0.0123 (0.000792, 4) | 101 (2.14, 4) | 0.150 (0.00983, 4) | 104 (3.60, 4) | >9950 (n=¼) | ND |

ND = Not Determined
^{a} Expression density is determined using homologous competition binding of [¹²⁵I]GLP-1(7-36)NH₂ at hGLP-1R (112 fmol/mg protein), [¹²⁵I]GCG at hGCGR (98 fmol/mg protein) and [¹²⁵I]GIP(1-42) at hGIPR (124 fmol/mg protein).
^{b} EC₅₀, nM = the Geometric Mean, followed by the Standard Error of the Mean and the number of observations in parenthesis.
^{c} Eₘₐₓ, % = the Arithmetic Mean ± the Standard Error of the Mean for the percent of maximal response to GLP-1(7-36)NH₂ at hGLP-1R, GCG at hGCGR or GIP(1-42)NH₂ athGIPR.
All values shown are to three (3) significant digits.

TABLE 3

Functional cAMP Potency (EC₅₀) and Efficacy (Eₘₐₓ) for Peptides Incubated at 37° C. (in the presence of 0.1% bovine casein and 1.0% human serum albumin)

| | hGIPR ^{a} | | hGLP-1R ^{a} | | hGCGR^{a} | |
|---|---|---|---|---|---|---|
| Example | EC₅₀, nM (SEM, n) ^{b} | Emax, % ± SEM^{c} | EC₅₀, nM (SEM, n) ^{b} | Emax, % ± SEM^{c} | EC₅₀, nM (SEM, n) ^{b} | Emax, % ± SEM ^{c} |
| hGIP(1-42)NH2 | 0.597 (0.0522, 132) | 98.0 ± 1.16 | | | | |
| hGLP-1(7-36)NH2 | | | 0.340 (0.0195, 133) | 105 ± 1.39 | | |
| hGCG | | | | | 2.37 (0.153, 135) | 102 (se=1.49, n=135) |
| 1 | 0.696 (0.0329, 3) | 87.5 ± 3.24 | 30.7 (3.51, 3) | 94.3 ± 4.39 | >9950 (n=⅓) | ND |
| 6 | 0.0823 (0.00389, 3) | 89.4 ± 1.74 | 4.19 (0.479, 3) | 99.2 ± 5.54 | >9950 (n=⅓) | ND |
| 2 | 0.659 (0.150, 2) | 87.8 ± 5.11 | 32.1 (0.134, 2) | 105 ± 3.87 | >9950 (n=½) | ND |
| 3 | 0.0971 | 80 | 1.05 | 107 | >9950 | ND |
| 4 | 0.0296 (0.00275, 4) | 88.3 ± 2.17 | 0.584 (0.0543, 4) | 98.2 ± 1.60 | >9950 (n=¼) | ND |
| 7 | 0.566 (0.0700, 5) | 94.1 ± 2.10 | 2.74 (0.284, 5) | 105 ± 2.62 | >9950 (n=⅕) | ND |
| 8 | 0.635 (0.120, 3) | 91.3 ± 3.11 | 8.00 (1.46, 3) | 106 ± 3.25 | >9950 (n=⅓) | ND |
| 5 | 0.372 (0.0352, 5) | 91.2 ± 3.65 | 4.78 (0.559, 5) | 103 ± 4.77 | >9950 (n=⅕) | ND |
| 9 | 0.211 (0.0411, 3) | 91.6 ± 4.63 | 8.82 (1.34, 3) | 105 ± 3.71 | >9950 (n=⅓) | ND |
| 10 | 0.121 (0.0130, 4) | 84.9 ± 1.84 | 4.38 (0.399, 4) | 99.8 ± 1.37 | >9950 (n=¼) | ND |
| 11 | 1.22 (0.0617, 4) | 90.0 ± 2.71 | 34.5 (1.60, 4) | 102 ± 0.940 | >9950 (n=¼) | ND |
| 12 | 0.745 (0.0971, 4) | 93.0 ± 2.25 | 20.3 (2.83, 4) | 103 ± 5.98 | >9950 (n=¼) | ND |
| 13 | 1.45 (0.180, 4) | 95.1 ± 3.55 | 6.79 (0.450, 4) | 95.9 ± 1.76 | >9950 (n=¼) | ND |
| 14 | 0.769 (0.0465, 4) | 89.5 ± 1.02 | 9.19 (0.283, 4) | 101 ± 2.00 | >9950 (n=¼) | ND |
| 15 | 0.573 (0.0563, 4) | 94.4 ± 1.01 | 24.8 (0.964, 4) | 93.2 ± 3.68 | >9950 (n=¼) | ND |
| 16 | 0.625 (0.0549, 4) | 91.5 ± 1.01 | 9.06 (0.814, 4) | 98.3 ± 0.735 | >9950 (n=¼) | ND |
| 17 | 0.605 (0.0691, 3) | 88.9 ± 2.36 | 48.9 (6.33, 3) | 99.3 ± 0.621 | >9950 (n=⅓) | ND |
| 18 | 1.12 (0.150, 3) | 86.9 ± 3.59 | 164 (42.5, 3) | 103 ± 5.83 | >9950 (n=⅓) | ND |
| 19 | 0.438 (0.0168, 3) | 89.7 ± 2.13 | 24.4 (3.41, 3) | 102 ± 2.33 | >9950 (n=⅓) | ND |
| 20 | 1.66 (0.433, 2) | 90.6 ± 0.878 | 62.4 (20.7, 2) | 101 ± 4.72 | >9950 (n=½) | ND |
| 21 | 0.302 (0.0443, 3) | 94.2 ± 3.12 | 0.806 (0.119, 3) | 107 ± 4.52 | >9950 (n=⅓) | ND |
| 22 | 0.533 (0.0909, 3) | 93.4 ± 0.775 | 1.50 (0.0680, 3) | 101 ± 1.14 | >9950 (n=⅓) | ND |
| 23 | 0.623 (0.0883, 3) | 95.3 ± 0.863 | 1.98 (0.220, 3) | 106 ± 1.77 | >9950 (n=⅓) | ND |
| 24 | 0.444 (0.0309, 3) | 92.4 ± 5.97 | 2.04 (0.143, 3) | 103 ± 5.84 | >9950 (n=⅓) | ND |
| 25 | 0.274 (0.0482, 3) | 94.3 ± 1.73 | 1.11 (0.0768, 3) | 103 ± 1.65 | >9950 (n=⅓) | ND |
| 26 | 1.20 (0.0936, 3) | 95.4 ± 2.54 | 3.93 (0.133, 3) | 105 ± 3.59 | >9950 (n=⅓) | ND |
| 27 | 6.78 (1.82, 2) | 82.8 ± 1.14 | 70.2 (2.19, 2) | 110 ± 3.03 | >9950 (n=½) | ND |
| 28 | 2.08 (0.820, 2) | 93.0 ± 7.02 | 60.4 (15.0, 2) | 101 ± 2.12 | >9950 (n=½) | ND |
| 29 | 0.472 (0.0549, 2) | 96.9 ± 5.32 | 0.876 (0.104, 2) | 107 ± 2.92 | >9950 (n=½) | ND |
| 30 | 0.337 (0.252, 2) | 91.8 ± 0.797 | 18.3 (3.71, 2) | 96.5 ± 0.219 | >9950 (n=½) | ND |
| 31 | 0.147 | 88.9 | 0.545 (0.128, 2) | 109 ± 7.91 | >9950 (n=½) | ND |
| 32 | 0.148 | 98.2 | 1.73 | 102 | >9950 | ND |
| 33 | 0.0941 (0.0207, 2) | 92.0 ± 1.02 | 4.35 (0.0139, 2) | 109 ± 0.0920 | >9950 (n=½) | ND |
| 34 | 0.213 (0.0165, 2) | 89.1 ± 2.00 | 19.8 (3.06, 2) | 107 ± 1.76 | >9950 (n=½) | ND |
| 35 | 0.350 (0.00250, 2) | 91.7 ± 1.28 | 16.4 (2.30, 2) | 109 ± 0.873 | >9950 (n=½) | ND |
| 36 | 0.408 (0.0282, 2) | 91.4 ± 0.667 | 10.9 (1.38, 2) | 101 ± 0.511 | >9950 (n=½) | ND |
| 37 | 0.306 (0.0256, 2) | 88.5 ± 0.188 | 17.0 (2.86, 2) | 99.9 ± 4.41 | >9950 (n=½) | ND |
| 38 | 0.539 (0.0934, 2) | 88.8 ± 0.590 | 12.5 (1.43, 2) | 115 ± 2.53 | >9950 (n=½) | ND |
| 39 | 0.342 (0.00832, 2) | 86.8 ± 3.27 | 7.98 (1.61, 2) | 111 ± 1.02 | >9950 (n=½) | ND |
| 40 | 0.301 (0.00465, 2) | 92.2 ± 6.05 | 6.69 (2.15, 2) | 103 ± 2.62 | >9950 (n=½) | ND |
| 41 | 0.405 (0.0540, 2) | 88.5 ± 0.638 | 27.2 (1.30, 2) | 104 ± 3.41 | >9950 (n=½) | ND |
| 42 | 1.000 (0.00288, 2) | 91.1 ± 0.670 | 26.7 (4.92, 2) | 105 ± 10.9 | >9950 (n=½) | ND |
| 43 | 0.375 | 100 | 35.6 | 98.7 | >9950 | ND |
| 44 | 1.68 | 87 | 125 | 94.5 | >9950 | ND |
| 45 | 13.7 | 72.5 | 387 | 109 | >9950 | ND |
| 46 | 12.8 | 73.3 | 261 | 117 | >9950 | ND |
| 47 | 0.777 | 85.6 | 1670 | 134 | >9950 | ND |
| 48 | 2.12 | 90.8 | 118 | 111 | >9950 | ND |
| 49 | 1.51 (0.110, 3) | 92.4 ± 4.07 | 20.1 (2.77, 3) | 104 ± 0.273 | >9950 (n=⅓) | ND |
| 50 | 1.81 (0.416, 3) | 91.4 ± 4.20 | 27.8 (3.38, 3) | 106 ± 0.713 | >9950 (n=⅓) | ND |
| 51 | 15.8 | 90.7 | 100 | 92.9 | >9950 | ND |
| 52 | 18.6 | 87.6 | 37.8 | 101 | >9950 | ND |
| 53 | 3.53 (1.25, 3) | 91.7 ± 1.16 | 13.2 (2.18, 3) | 89.3 ± 6.12 | >9950 (n=⅓) | ND |
| 54 | 0.865 | 85.6 | 20.3 | 103 | >9950 | ND |
| 55 | 6.62 (0.645, 3) | 85.7 ± 0.885 | 70.5 (4.49, 3) | 112 ± 0.840 | >9950 (n=⅓) | ND |
| 56 | 6.75 (0.962, 3) | 91.4 ± 1.04 | 123 (8.75, 3) | 123 ± 6.57 | >9950 (n=⅓) | ND |
| 57 | 4.55 (0.383, 2) | 92.1 ± 5.54 | 39.3 (0.445, 2) | 114 ± 7.39 | >9950 (n=½) | ND |
| 58 | 1.12 (0.134, 2) | 92.2 ± 7.40 | 21.6 (2.74, 2) | 106 ± 3.99 | >9950 (n=½) | ND |
| 59 | 1.52 (0.323, 2) | 90.3 ± 3.64 | 16.2 (2.88, 2) | 108 ± 9.04 | >9950 (n=½) | ND |
| 60 | 1.20 (0.0303, 2) | 89.4 ± 4.57 | 28.5 (3.31, 2) | 111 ± 3.97 | >9950 (n=½) | ND |
| 61 | 0.744 | 92.8 | 36.9 | 89.7 | >9950 | ND |
| 62 | 1.27 (0.343, 2) | 94.3 ± 0.785 | 34.0 (10.3, 2) | 85.8 ± 3.31 | >9950 (n=½) | ND |
| 63 | 0.771 | 101 | 47.6 | 98 | >9950 | ND |
| 64 | 0.986 (0.230, 2) | 90.5 ± 3.44 | 27.0 (4.48, 2) | 87.8 ± 0.301 | >9950 (n=½) | ND |
| 65 | 1.05 (0.102, 2) | 93.8 ± 6.73 | 25.5 (5.32, 2) | 104 ± 2.15 | >9950 (n=½) | ND |
| 66 | 0.787 (0.0298, 2) | 90.6 ± 3.37 | 27.0 (8.48, 2) | 93.0 ± 2.36 | >9950 (n=½) | ND |
| 67 | 0.0417 | 91.9 | 12 | 104 | >9950 | ND |
| 68 | 0.0831 | 92.4 | 5.79 | 102 | >9950 | ND |
| 69 | 2.32 | 86.8 | 18.9 | 102 | >9950 | ND |
| 70 | 1.73 (0.0380, 2) | 89.9 ± 0.987 | 27.0 (3.69, 2) | 106 ± 4.82 | >9950 (n=½) | ND |
| 71 | 3.07 | 99.1 | 43.7 | 100 | >9950 | ND |
| 72 | 3.55 | 95.9 | 40.1 | 98.8 | >9950 | ND |
| 73 | 2.16 | 80.2 | 56.2 | 109 | >9950 | ND |
| 74 | 2.19 | 86.7 | 59.5 | 110 | >9950 | ND |
| 75 | 2.18 (0.153, 2) | 87.8 ± 3.33 | 41.3 (8.02, 2) | 97.0 ± 8.30 | >9950 (n=½) | ND |
| 76 | 1.40 (0.683, 2) | 89.9 ± 2.11 | 28.9 (1.46, 2) | 100 ± 13.5 | >9950 (n=½) | ND |
| 78 | 0.242 (0.0493, 2) | 89.7 ± 2.65 | 4.29 (0.505, 2) | 99.2 ± 0.361 | >9950 (n=½) | ND |
| 79 | 2.31 | 95 | 15.1 | 109 | >9950 | ND |
| 81 | 0.531 | 97.4 | 3.47 | 95 | >9950 | ND |
| 87 | 4.84 | 89.2 | 80 | 101 | >9950 | ND |
| 88 | 0.591 | 80.3 | 209 | 102 | >9950 | ND |
| 89 | 1.49 | 94.2 | 27.7 | 108 | >9950 | ND |
| 90 | 3.81 | 104 | 23.4 | 96.6 | >9950 | ND |
| 91 | 7.05 | 91.9 | 20.4 | 89.8 | >9950 | ND |
| 92 | 2.64 | 102 | 76.8 | 108 | >9950 | ND |
| 93 | 5.58 | 92 | 66 | 90.2 | >9950 | ND |
| 94 | 2.81 | 97.1 | 145 | 113 | >9950 | ND |
| 95 | 4.68 | 86.9 | 8.84 | 84 | >9950 | ND |
| 97 | 5.49 | 93.1 | 227 | 103 | >9950 | ND |
| 98 | 4.97 | 95 | 58.1 | 97.5 | >9950 | ND |
| 99 | 2.49 | 102 | 20 | 81.1 | >9950 | ND |
| 100 | 2.61 | 98.3 | 402 | 123 | >9950 | ND |
| 102 | 2.36 | 96.9 | 367 | 106 | >9950 | ND |
| 103 | 0.515 | 94.2 | 35.5 | 96.9 | >9950 | ND |
| 104 | 0.52 | 95.9 | 12.3 | 95.8 | >9950 | ND |
| 131 | 0.0581 (0.00374, 2) | 90.4 ± 1.62 | 1.04 (0.0207, 2) | 112 ± 1.76 | >9950 (n=½) | ND |
| 133 | 0.0695 (0.0139, 2) | 89.1 ± 4.64 | 1.17 (0.0663, 2) | 105 ± 5.52 | >9950 (n=½) | ND |
| 135 | 0.0609 (0.0105, 2) | 91.2 ± 4.78 | 0.936 (0.160, 2) | 101 ± 1.98 | >9950 (n=½) | ND |
| 137 | 0.728 (0.0218, 2) | 90.3 ± 0.387 | 5.02 (0.348, 2) | 103 ± 3.88 | >9950 (n=½) | ND |
| 141 | 0.379 (0.0143, 2) | 96.0 ± 7.42 | 5.78 (1.57, 2) | 115 ± 2.04 | >9950 (n=½) | ND |
| 150 | 0.350 (0.0449, 2) | 81.3 ± 3.18 | 11.0 (2.84, 2) | 100 ± 3.80 | >9950 (n=½) | ND |
| 151 | 0.306 (0.0354, 2) | 87.5 ± 3.78 | 17.3 (6.93, 2) | 112 ± 8.42 | >9950 (n=½) | ND |
| 153 | 1.15 (0.0744, 2) | 94.1 ± 3.21 | 40.8 (6.36, 2) | 98.2 ± 5.40 | >9950 (n=½) | ND |
| 154 | 1.34 (0.0132, 2) | 93.0 ± 4.96 | 70.5 (3.34, 2) | 103 ± 3.93 | >9950 (n=½) | ND |
| 155 | 1.25 (0.0855, 2) | 96.5 ± 1.04 | 34.6 (4.78, 2) | 102 ± 2.27 | >9950 (n=½) | ND |
| 157 | 0.718 (0.0184, 2) | 89.6 ± 3.39 | 36.0 (2.81, 2) | 101 ± 4.27 | >9950 (n=½) | ND |
| 164 | 3.62 | 93 | 26.6 | 95.4 | >9950 | ND |
| 172 | 0.385 (0.0503, 2) | 80.1 ± 2.06 | 7.70 (0.104,2) | 112 ± 10.3 | >9950 (n=½) | ND |
| 173 | 1.24 (0.0219, 2) | 92.9 ± 6.91 | 29.7 (4.49, 2) | 99.5 ± 1.80 | >9950 (n=½) | ND |
| 183 | 1.22 | 75.5 | 66.6 | 97.3 | >9950 | ND |
| 184 | 2.46 | 81.2 | 119 | 87.8 | >9950 | ND |
| 185 | 0.335 | 86.2 | 11.3 | 103 | >9950 | ND |
| 186 | 2.19 | 85.6 | 24.3 | 107 | >9950 | ND |
| 187 | 0.939 | 79.3 | 18 | 109 | >9950 | ND |
| 188 | 1.37 | 89 | 19.1 | 106 | >9950 | ND |
| 190 | 1.55 (0.169, 2) | 82.8 ± 3.36 | 28.9 (0.482, 2) | 112 ± 8.50 | >9950 (n=½) | ND |
| 191 | 0.866 (0.0257, 2) | 86.2 ± 5.50 | 13.1 (2.25, 2) | 105 ± 7.98 | >9950 (n=½) | ND |
| 192 | 0.832 (0.0527, 2) | 93.6 ± 3.98 | 11.2 (3.64, 2) | 121 ± 2.56 | >9950 (n=½) | ND |
| 193 | 1.47 (0.124, 2) | 92.2 ± 0.240 | 24.3 (4.18, 2) | 104 ± 8.64 | >9950 (n=½) | ND |
| 194 | 1.24 (0.0572, 2) | 80.7 ± 7.81 | 21.2 (4.53, 2) | 109 ± 10.5 | >9950 (n=½) | ND |
| 195 | 0.771 (0.268, 2) | 87.0 ± 12.2 | 14.0 (3.17, 2) | 106 ± 2.61 | >9950 (n=½) | ND |
| 196 | 0.712 (0.191, 2) | 80.8 ± 0.269 | 21.4 (1.40, 2) | 112 ± 4.62 | >9950 (n=½) | ND |
| 197 | 2.06 (0.255, 2) | 84.5 ± 4.08 | 26.2 (3.64, 2) | 102 ± 2.64 | >9950 (n=½) | ND |
| 198 | 1.06 (0.264, 2) | 83.1 ± 3.45 | 14.5 (3.33, 2) | 108 ± 0.518 | >9950 (n=½) | ND |
| 199 | 2.45 | 77.1 | 70 | 100 | >9950 | ND |
| 200 | 2.7 | 83.7 | 26.6 | 97.4 | >9950 | ND |
| 201 | 13.2 | 80.5 | 25.1 | 104 | >9950 | ND |
| 202 | 6.09 | 75.3 | 62.2 | 109 | >9950 | ND |
| 203 | 0.682 | 87.2 | 3.38 | 105 | >9950 | ND |
| 204 | 0.341 | 83.3 | 2.44 | 104 | >9950 | ND |
| 205 | 0.261 (0.0684, 2) | 72.1 (10.2, 2) | 2.18 (0.439, 2) | 106 (1.66, 2) | >9950 (n=½) | ND |
| 206 | 0.242 (0.107, 2) | 77.6 (6.91, 2) | 3.03 (0.792, 2) | 98.1 (0.421, 2) | >9950 (n=½) | ND |
| 207 | 0.591 (0.0545, 2) | 97.9 (9.30, 2) | 2.98 (0.814, 2) | 112 (10.5, 2) | >9950 (n=½) | ND |
| 208 | 0.126 (0.0370, 2) | 64.1 (0.979, 2) | 1.58 (0.664, 2) | 105 (8.90, 2) | >9950 (n=½) | ND |
| 209 | 0.173 (0.0236, 2) | 90.8 (2.77, 2) | 1.16 (0.312, 2) | 109 (4.47, 2) | >9950 (n=½) | ND |
| 210 | 0.440 (0.0195, 2) | 68.1 (7.17, 2) | 8.86 (0.573, 2) | 110 (7.68, 2) | >9950 (n=½) | ND |
| 211 | 2.16 | 64.5 | 94.2 | 99 | >9950 | ND |
| 212 | 16.6 | 81 | 33.7 | 91 | >9950 | ND |
| 213 | 4.38 | 95.6 | 40.3 | 102 | >9950 | ND |
| 214 | 2.03 | 80.4 | 17.9 | 108 | >9950 | ND |
| 215 | 0.925 | 91.3 | 14.8 | 107 | >9950 | ND |
| 216 | 5.31 | 63.4 | 32.3 | 117 | >9950 | ND |
| 217 | 7.84 | 62.7 | 87.8 | 118 | >9950 | ND |
| 218 | 3.27 | 95.9 | 36.6 | 121 | >9950 | ND |
| 219 | 2.86 (1.19, 2) | 82.9 (17.7, 2) | 25.9 (3.30, 2) | 101 (2.32, 2) | >9950 (n=½) | ND |
| 220 | 11.6 | 83.5 | 150 | 110 | >9950 | ND |
| 221 | 0.838 | 67.4 | 17.9 | 92.3 | >9950 | ND |
| 222 | 2.1 | 77.9 | 13.8 | 117 | >9950 | ND |
| 223 | 7.84 | 79.2 | 90.5 | 115 | >9950 | ND |
| 224 | 2.92 | 90.6 | 71 | 102 | >9950 | ND |
| 225 | 1.81 | 67.5 | 51.6 | 106 | >9950 | ND |
| 226 | 4.86 | 92.1 | 11.3 | 118 | >9950 | ND |
| 227 | 1.59 | 76.1 | 41.8 | 111 | >9950 | ND |
| 228 | 3.37 | 83.3 | 42 | 119 | >9950 | ND |
| 229 | 7.35 | 80.5 | 135 | 99 | >9950 | ND |
| 230 | 2.57 (0.207, 3) | 85.8 (2.02, 3) | 49.7 (3.88, 3) | 103 (3.29, 3) | >9950 (n=⅓) | ND |
| 231 | 2.46 (0.528, 2) | 85.4 (1.66, 2) | 51.8 (5.87, 2) | 109 (2.34, 2) | >9950 (n=½) | ND |
| 232 | 1.86 | 91.5 | 33.6 | 95.4 | >9950 | ND |
| 233 | 6.08 (0.278, 2) | 91.4 (1.15, 2) | 56.7 (19.2, 2) | 116 (15.0, 2) | >9950 (n=½) | ND |
| 234 | 7.58 | 84.4 | 156 | 102 | >9950 | ND |
| 235 | 10.1 | 92.2 | 598 | 152 | >9950 | ND |
| 236 | 0.641 (0.0940, 2) | 80.5 (3.87, 2) | 32.6 (4.16, 2) | 125 (2.87, 2) | >9950 (n=½) | ND |
| 237 | 0.889 (0.480, 2) | 93.1 (3.84, 2) | 38.1 (0.788, 2) | 113 (2.42, 2) | >9950 (n=½) | ND |
| 238 | 1.31 (0.644, 2) | 90.5 (11.3, 2) | 27.2(1.11, 2) | 103 (2.10, 2) | >9950 (n=½) | ND |
| 239 | 5.46 (2.04, 2) | 89.1 (0.575, 2) | 25.2 (9.76, 2) | 109 (1.64, 2) | >9950 (n=½) | ND |
| 240 | 11.7 (0.555, 2) | 87.2 (11.8, 2) | 150 (5.84, 2) | 107 (1.18, 2) | >9950 (n=½) | ND |
| 241 | 8.02 (3.37, 2) | 84.9 (9.74, 2) | 103 (8.35, 2) | 105 (4.79, 2) | >9950 (n=½) | ND |
| 242 | 11.0 (5.42, 2) | 83.9 (8.92, 2) | 214 (35.7, 2) | 102 (0.239, 2) | >9950 (n=½) | ND |
| 243 | 0.728 (0.185, 3) | 90.5 (0.658, 3) | 34.7 (7.58, 3) | 114 (12.1, 3) | >9950 (n=⅓) | ND |
| 244 | 0.983 (0.411, 3) | 89.5 (3.16, 3) | 30.8 (6.22, 3) | 96.3 (3.54, 3) | >9950 (n=⅓) | ND |
| 245 | 0.552 (0.0557, 3) | 81.9 (4.90, 3) | 27.0 (1.02, 3) | 93.8 (2.93, 3) | >9950 (n=⅓) | ND |
| 246 | 1.63 (0.495, 3) | 91.0 (3.43, 3) | 22.9 (6.17, 3) | 108 (9.08, 3) | >9950 (n=⅓) | ND |
| 247 | 4.24 (0.948, 2) | 90.2 (4.32, 2) | 77.7 (0.558, 2) | 109 (1.12, 2) | >9950 (n=½) | ND |
| 248 | 4.10 (1.68, 2) | 91.8 (0.258, 2) | 56.7 (2.29, 2) | 92.7 (4.61, 2) | >9950 (n=½) | ND |
| 249 | 5.88 | 88.9 | 51.6 | 105 | >9950 | ND |
| 250 | 38.8 | 101 | 63 | 105 | >9950 | ND |
| 251 | 14.3 | 71.2 | 51 | 104 | >9950 | ND |
| 252 | 29.9 | 87.2 | 131 | 115 | >9950 | ND |
| 253 | 21.7 (1.79, 3) | 78.9 (6.58, 3) | 192 (28.9, 3) | 114 (7.97, 3) | >9950 (n=⅓) | ND |
| 254 | 16.8 (1.47, 3) | 68.5 (4.32, 3) | 211 (49.2, 3) | 122 (16.8, 3) | >9950 (n=⅓) | ND |
| 255 | 2.27 | 93.4 | 13.7 | 106 | >9950 | ND |
| 256 | 1.5 | 75.3 | 12.6 | 95.5 | >9950 | ND |
| 257 | 5.61 | 72.2 | 46.3 | 102 | >9950 | ND |
| 258 | 5.28 | 84.3 | 41.5 | 103 | >9950 | ND |
| 259 | 2.34 | 66.4 | 28.9 | 99.2 | >9950 | ND |
| 260 | 3.27 | 83 | 32 | 107 | >9950 | ND |
| 261 | 2.28 | 75.7 | 15.6 | 104 | >9950 | ND |
| 262 | 8.15 | 79.7 | 69.8 | 115 | >9950 | ND |
| 263 | 5.91 | 72.7 | 56.7 | 95.8 | >9950 | ND |
| 264 | 7.12 | 84.4 | 75.2 | 105 | >9950 | ND |
| 265 | 0.775 (0.0602, 2) | 96.0 (0.960, 2) | 5.14 (1.17, 2) | 102 (2.46, 2) | >9950 (n=½) | ND |
| 266 | 0.575 | 82.7 | 5.83 | 97.6 | >9950 | ND |
| 267 | 0.808 | 88.1 | 8.46 | 104 | >9950 | ND |
| 268 | 5.06 | 92.3 | 26.5 | 104 | >9950 | ND |
| 269 | 2.65 (3.59, 3) | 87.3 (0.702, 3) | 46.5 (16.2, 3) | 105 (4.56, 3) | >9950 (n=⅓) | ND |
| 270 | 3.8 | 80.9 | 32.6 | 111 | >9950 | ND |
| 271 | 0.767 | 97.3 | 10.2 | 122 | >9950 | ND |
| 272 | 0.561 | 81.2 | 4.72 | 102 | >9950 | ND |
| 273 | 0.318 | 88.4 | 40.9 | 90.5 | >9950 | ND |
| 274 | 1.16 | 93.5 | 32.9 | 121 | >9950 | ND |
| 275 | 0.926 | 101 | 33.5 | 103 | >9950 | ND |
| 276 | 1.97 | 91.4 | 63.6 | 104 | >9950 | ND |
| 277 | 0.962 | 99.3 | 12.2 | 93.1 | >9950 | ND |
| 278 | 1.41 | 91.1 | 27 | 121 | >9950 | ND |
| 279 | 3.21 | 88.6 | 36.6 | 114 | >9950 | ND |
| 280 | 4.84 | 88.5 | 49.9 | 105 | >9950 | ND |
| 281 | 1.87 | 97.9 | 22.4 | 91.7 | >9950 | ND |
| 282 | 1.44 | 84.4 | 31.8 | 102 | >9950 | ND |
| 283 | 4.88 | 114 | 49.5 | 96.6 | >9950 | ND |
| 284 | 8.38 | 101 | 137 | 112 | >9950 | ND |
| 285 | 1.28 | 84.7 | 136 | 105 | >9950 | ND |
| 286 | 2.18 | 104 | 35 | 90.3 | >9950 | ND |
| 287 | 3.76 | 98.9 | 83.8 | 106 | >9950 | ND |
| 288 | 0.48 | 85.2 | 17.1 | 123 | >9950 | ND |
| 289 | 3.11 | 94.9 | 627 | 170 | >9950 | ND |
| 290 | 0.878 | 93.4 | 12.1 | 109 | >9950 | ND |
| 291 | 0.833 | 92.9 | 7.43 | 100 | >9950 | ND |
| 292 | 0.416 (0.0297, 5) | 88.4 (4.96, 5) | 4.35 (0.151, 5) | 101 (2.62, 5) | >9950 (n=⅕) | ND |
| 293 | 0.987 (0.168, 3) | 96.6 (2.52, 3) | 10.7 (0.553, 3) | 99.4 (3.13, 3) | >9950 (n=⅓) | ND |
| 294 | 0.833 | 107 | 6.26 | 104 | >9950 | ND |
| 295 | 1.09 | 99.6 | 10.4 | 101 | >9950 | ND |
| 296 | 0.823 | 91.9 | 13 | 109 | >9950 | ND |
| 297 | 1.54 | 93.7 | 19.1 | 108 | >9950 | ND |
| 298 | 0.237 (0.0133, 3) | 95.0 (3.55, 3) | 3.64 (1.18, 3) | 107 (10.3, 3) | >9950 (n=⅓) | ND |
| 299 | 0.204 (0.0143, 3) | 99.8 (4.40, 3) | 2.58 (0.211, 3) | 102 (1.94, 3) | >9950 (n=⅓) | ND |
| 300 | 1.25 (0.0915, 3) | 91.5 (6.45, 3) | 19.6 (2.89, 3) | 109 (2.14, 3) | >9950 (n=⅓) | ND |
| 301 | 0.919 (0.0935, 2) | 85.5 (3.43, 2) | 12.9 (0.666, 2) | 106 (7.59, 2) | >9950 (n=½) | ND |
| 302 | 0.453 (0.00185, 2) | 86.3 (0.816, 2) | 6.55 (0.397, 2) | 99.4 (1.04, 2) | >9950 (n=½) | ND |
| 303 | 2 | 89.8 | 50.4 | 111 | >9950 | ND |
| 304 | 4.83 | 99.3 | 64.2 | 98.3 | >9950 | ND |
| 305 | 4.34 | 95.4 | 80.3 | 125 | >9950 | ND |
| 306 | 1.12 | 102 | 18.2 | 102 | >9950 | ND |
| 307 | 1.66 | 81.8 | 33 | 109 | >9950 | ND |
| 308 | 10.5 | 98.4 | 67.3 | 92.2 | >9950 | ND |
| 309 | 6.08 | 95.3 | 64.6 | 106 | >9950 | ND |
| 310 | 2.4 | 83.9 | 22 | 106 | >9950 | ND |
| 311 | 2.16 | 98.3 | 33.8 | 104 | >9950 | ND |
| 312 | 4.48 | 89.5 | 50.8 | 112 | >9950 | ND |
| 313 | 21.9 | 101 | 98.8 | 95 | >9950 | ND |
| 314 | 3.51 | 101 | 38.6 | 102 | >9950 | ND |
| 315 | 0.393 | 89.2 | 5.38 | 93.5 | >9950 | ND |
| 316 | 1.11 | 102 | 19.2 | 113 | >9950 | ND |
| 317 | 2.03 (0.0584, 2) | 84.4 (8.11, 2) | 29.5 (4.64, 2) | 98.1 (5.04, 2) | >9950 (n=½) | ND |
| 318 | 5.42 (0.737, 2) | 91.4 (2.19, 2) | 28.7 (1.02, 2) | 101 (1.14, 2) | >9950 (n=½) | ND |
| 319 | 3.35 (1.04, 2) | 92.5 (5.28, 2) | 28.1 (3.97, 2) | 114 (17.1, 2) | >9950 (n=½) | ND |
| 320 | 0.338 | 84.1 | 6.22 | 99.2 | >9950 | ND |
| 321 | 0.631 | 94.5 | 13.9 | 96.6 | >9950 | ND |
| 322 | 0.617 (0.107, 5) | 89.7 (3.98, 5) | 8.09 (0.489, 5) | 94.5 (2.57, 5) | >9950 (n=⅕) | ND |
| 323 | 0.694 | 92.9 | 9.52 | 104 | >9950 | ND |
| 324 | 0.321 (0.0210, 5) | 85.4 (4.62, 5) | 4.38 (0.281, 5) | 99.4 (4.29, 5) | >9950 (n=⅕) | ND |
| 325 | 3.96 (0.456, 2) | 94.7 (5.70, 2) | 23.5 (6.01, 2) | 98.4 (2.48, 2) | >9950 (n=½) | ND |
| 326 | 4.62 (0.384, 2) | 88.7 (7.81, 2) | 26.1 (0.140, 2) | 96.1 (2.59, 2) | >9950 (n=½) | ND |
| 327 | 0.751 | 90.2 | 13.6 | 97.6 | >9950 | ND |
| 328 | 0.75 | 85.5 | 23.3 | 102 | >9950 | ND |
| 329 | 5.44 | 100 | 74.7 | 88.3 | >9950 | ND |
| 330 | 6.26 | 103 | 85.2 | 85 | >9950 | ND |
| 331 | 8.31 | 108 | 223 | 114 | >9950 | ND |
| 332 | 4.59 | 96.5 | 33.3 | 116 | >9950 | ND |
| 333 | 6.74 | 100 | 70.4 | 93.3 | >9950 | ND |
| 334 | 0.618 (0.0980, 5) | 89.0 (3.96, 5) | 8.67 (0.430, 5) | 105 (3.28, 5) | >9950 (n=⅕) | ND |
| 335 | 1.04 | 85.2 | 12.3 | 101 | >9950 | ND |
| 336 | 2.92 (0.0217, 2) | 94.6 (4.74, 2) | 47.0 (6.26, 2) | 103 (8.40, 2) | >10100 (n=½) | ND |
| 337 | 2.65 (0.235, 2) | 86.8 (4.14, 2) | 53.6 (8.71, 2) | 100 (1.63, 2) | >10100 (n=½) | ND |
| 338 | 1.24 (0.0430, 2) | 83.9 (2.56, 2) | 36.6 (6.57, 2) | 103 (1.43, 2) | >10100 (n=½) | ND |
| 339 | 4.35 (0.915, 2) | 87.3 (9.37, 2) | 68.2 (10.6, 2) | 115 (6.65, 2) | >10100 (n=½) | ND |
| 340 | 9.91 | 87.9 | 122 | 112 | >9950 | ND |
| 341 | 5.74 (0.563, 2) | 83.6 (3.95, 2) | 95.8 (1.69, 2) | 113 (8.64, 2) | >9950 (n=½) | ND |
| 342 | 1.04 (0.0681, 2) | 89.3 (1.18, 2) | 13.6 (0.635, 2) | 101 (2.94, 2) | >9950 (n=½) | ND |
| 343 | 2.38 | 90.2 | 20.2 | 98.2 | >9950 | ND |
| 344 | 6.78 | 87.3 | 48.3 | 96.5 | >9950 | ND |
| 345 | 0.731 (0.0103, 2) | 86.8 (8.74, 2) | 11.8 (1.13, 2) | 110 (2.77, 2) | >9950 (n=½) | ND |
| 346 | 1.83 | 83.9 | 19 | 97.7 | >9950 | ND |
| 347 | 7.27 | 84.6 | 51.7 | 99.5 | >9950 | ND |
| 348 | 1.79 | 79.3 | 8.95 | 98 | >9950 | ND |
| 349 | 0.606 | 79.3 | 5.15 | 94.3 | >9950 | ND |
| 350 | 5.82 | 73.5 | 6.4 | 91.4 | >9950 | ND |
| 351 | 0.722 | 67.9 | 5.8 | 91 | >9950 | ND |
| 352 | 0.277 | 71.3 | 5.46 | 93.5 | >9950 | ND |
| 353 | 5.35 | 84.8 | 7.12 | 92.5 | >9950 | ND |
| 354 | 0.857 | 67.5 | 7.25 | 95.9 | >9950 | ND |
| 355 | 1.81 | 86 | 11.3 | 109 | >9950 | ND |
| 356 | 2.47 | 82.7 | 23.4 | 93 | >9950 | ND |
| 357 | 1.19 (0.250, 2) | 78.2 (14.7, 2) | 36.2 (2.98, 2) | 92.8 (1.82, 2) | >9950 (n=½) | ND |
| 358 | 2.06 (0.735, 2) | 86.2 (0.397, 2) | 65.3 (2.90, 2) | 102 (4.28, 2) | >9950 (n=½) | ND |
| 359 | 1.58 (0.643, 2) | 81.0 (10.1, 2) | 40.5 (4.21, 2) | 95.1 (1.93, 2) | >9950 (n=½) | ND |
| 360 | 1.91 (0.0821, 2) | 84.3 (10.5, 2) | 28.2 (0.0380, 2) | 97.1 (5.05, 2) | >9950 (n=½) | ND |
| 361 | 1.44 (0.180, 2) | 88.8 (5.34, 2) | 43.0 (0.650, 2) | 98.8 (3.89, 2) | >9950 (n=½) | ND |
| 362 | 0.936 (0.0457, 2) | 86.7 (0.254, 2) | 29.9 (0.294, 2) | 107 (6.56, 2) | >9950 (n=½) | ND |
| 363 | 0.976 | 91.1 | 14.3 | 111 | >9950 | ND |
| 364 | 0.895 | 89.1 | 13 | 102 | >9950 | ND |
| 365 | 1.93 | 93.5 | 22.3 | 91 | >9950 | ND |
| 366 | 3.14 | 95.9 | 96.2 | 98.3 | >9950 | ND |
| 372 | 3.75 | 90.6 | 38 | 101 | >9950 | ND |
| 373 | 2.84 | 82.4 | 37.4 | 112 | >9950 | ND |
| 374 | 1.96 | 88.8 | 39.7 | 108 | >9950 | ND |
| 375 | 4.68 | 85.4 | 56.1 | 113 | >9950 | ND |
| 376 | 39.6 | 88.3 | 419 | 121 | >9950 | ND |
| 377 | 17.5 | 79.4 | 178 | 110 | >9950 | ND |
| 378 | 7.46 (0.401, 2) | 81.2 (0.297, 2) | 47.7 (5.86, 2) | 104 (2.97, 2) | >9950 (n=½) | ND |
| 379 | 11.6 (3.09, 2) | 90.0 (2.40, 2) | 48.5 (1.05, 2) | 101 (1.65, 2) | >9950 (n=½) | ND |
| 380 | 9.23 (1.41, 2) | 93.5 (4.71, 2) | 28.0 (2.79, 2) | 94.5 (0.549, 2) | >9950 (n=½) | ND |
| 381 | 28 | 90.3 | 153 | 106 | >9950 | ND |
| 382 | 18.7 | 87.2 | 204 | 118 | >9950 | ND |
| 383 | 10.7 (0.361, 2) | 82.8 (0.0145, 2) | 92.2 (7.22, 2) | 102 (1.72, 2) | >9950 (n=½) | ND |
| 384 | 0.457 (0.0717, 2) | 83.5 (7.50, 2) | 5.32 (0.0375, 2) | 99.5 (3.98, 2) | >9950 (n=½) | ND |
| 385 | 0.558 (0.0738, 2) | 83.5 (1.48, 2) | 10.6 (0.719, 2) | 112 (4.74, 2) | >9950 (n=½) | ND |
| 386 | 2.08 (0.338, 2) | 81.3 (1.47, 2) | 17.7 (0.911, 2) | 96.8 (3.81, 2) | >9950 (n=½) | ND |
| 387 | 0.278 (0.00115, 2) | 93.0 (6.92, 2) | 4.40 (1.07, 2) | 103 (1.08, 2) | >9950 (n=½) | ND |
| 388 | 0.463 | 82.1 | 6.31 | 104 | >9950 | ND |
| 389 | 1.50 (0.343, 2) | 82.0 (2.14, 2) | 9.58 (1.62, 2) | 106 (0.535, 2) | >9950 (n=½) | ND |
| 390 | 3.85 (0.361, 3) | 89.3 (3.58, 3) | 24.3 (1.05, 3) | 94.6 (2.35, 3) | >9950 (n=⅓) | ND |
| 391 | 0.266 (0.0311, 4) | 88.3 (1.76, 4) | 2.62 (0.437, 4) | 105 (2.45, 4) | >9950 (n=¼) | ND |
| 392 | 0.797 | 85.7 | 3.14 | 93.7 | >9950 | ND |
| 393 | 0.547 | 66.7 | 9.18 | 103 | >9950 | ND |
| 394 | 1.38 (0.437, 2) | 84.6 (11.0, 2) | 5.83 (1.31, 2) | 96.8 (7.02, 2) | >9950 (n=½) | ND |
| 395 | 0.327 | 57.8 | 6.26 | 96.1 | >9950 | ND |
| 396 | 0.595 | 67.1 | 6.49 | 94.4 | >9950 | ND |
| 397 | 1.92 (0.780, 2) | 84.5 (11.6, 2) | 7.17 (0.884, 2) | 103 (8.65, 2) | >9950 (n=½) | ND |
| 398 | 5.40 (1.52, 2) | 91.9 (0.357, 2) | 41.3 (4.18, 2) | 106 (4.28, 2) | >9950 (n=½) | ND |
| 399 | 16.2 | 86.8 | 43.6 | 89.7 | >9950 | ND |
| 400 | 16.7 | 83.2 | 107 | 109 | >9950 | ND |
| 401 | 0.434 (0.0341, 3) | 83.0 (7.25, 3) | 5.39 (0.0937, 3) | 107 (3.32, 3) | >9950 (n=⅓) | ND |
| 402 | 1.11 (0.0989, 3) | 84.5 (0.945, 3) | 13.5 (2.55, 3) | 110 (5.84, 3) | >9950 (n=⅓) | ND |
| 403 | 0.711 (0.103, 3) | 91.7 (6.87, 3) | 7.31 (0.446, 3) | 107 (2.08, 3) | >9950 (n=⅓) | ND |
| 404 | 1.74 | 77.3 | 49.1 | 99.3 | >9950 | ND |
| 405 | 1.23 | 74.3 | 37.5 | 78.1 | >9950 | ND |
| 406 | 0.527 (0.130, 2) | 87.3 (2.48, 2) | 9.21 (0.435, 2) | 96.0 (2.59, 2) | >9950 (n=½) | ND |
| 407 | 1.87 (0.139, 3) | 95.4 (4.35, 3) | 12.4(1.15, 3) | 97.2 (2.74, 3) | >9950 (n=⅓) | ND |
| 408 | 0.299 (0.0439, 3) | 84.4 (2.26, 3) | 5.92 (0.553, 3) | 99.5 (3.91, 3) | >9950 (n=⅓) | ND |
| 409 | 0.537 (0.0122, 3) | 84.0 (0.901, 3) | 8.05 (0.761, 3) | 97.7 (3.00, 3) | >9950 (n=⅓) | ND |
| 410 | 1.28 (0.255, 2) | 86.4 (5.77, 2) | 11.0 (0.428, 2) | 93.1 (0.997, 2) | >9950 (n=½) | ND |
| 411 | 1.09 (0.153, 3) | 84.6 (2.63, 3) | 11.4(1.88, 3) | 101 (2.54, 3) | >9950 (n=⅓) | ND |
| 412 | 1.57 (0.136, 3) | 87.5 (2.85, 3) | 18.3 (1.35, 3) | 106 (3.38, 3) | >9950 (n=⅓) | ND |
| 413 | 0.422 (0.0398, 3) | 91.8 (3.88, 3) | 5.47 (0.460, 3) | 107 (4.11, 3) | >9950 (n=⅓) | ND |
| 414 | 0.274 (0.0130, 5) | 92.2 (1.90, 5) | 3.24 (0.450, 5) | 103 (3.30, 5) | >9950 (n=⅕) | ND |
| 415 | 0.492 (0.0557, 4) | 93.9 (2.34, 4) | 5.72 (0.324, 4) | 104 (3.90, 4) | >9950 (n=¼) | ND |
| 416 | 0.723 (0.0458, 3) | 83.0 (5.25, 3) | 10.1 (0.689, 3) | 109 (2.55, 3) | >9950 (n=⅓) | ND |
| 417 | 0.201 (0.0212, 4) | 96.4 (1.41, 4) | 2.66 (0.254, 4) | 104 (2.88, 4) | >9950 (n=¼) | ND |
| 418 | 0.126 (0.0101, 3) | 87.2 (4.56, 3) | 1.72 (0.202, 3) | 98.8 (3.48, 3) | >9950 (n=⅓) | ND |
| 419 | 0.440 (0.0108, 3) | 88.2 (0.828, 3) | 7.19(1.28, 3) | 97.3 (3.90, 3) | >9950 (n=⅓) | ND |
| 420 | 0.351 (0.0281, 2) | 89.7 (1.93, 2) | 10.0 (1.52, 2) | 109 (14.4, 2) | >9950 (n=½) | ND |
| 421 | 0.164 (0.0176, 5) | 98.0 (2.76, 5) | 2.01 (0.326, 5) | 105 (3.71, 5) | >9950 (n=⅕) | ND |
| 422 | 0.199 (0.0226, 5) | 97.5 (1.55, 5) | 3.84 (0.645, 4) | 102 (6.38, 4) | >9950 (n=⅕) | ND |
| 423 | 0.294 (0.0208, 5) | 89.7 (3.15, 5) | 4.74 (0.644, 5) | 99.5 (3.90, 5) | >9950 (n=⅕) | ND |
| 424 | 0.159 (0.0110, 5) | 89.5 (1.11, 5) | 3.07 (0.179, 5) | 98.1 (3.03, 5) | >9950 (n=⅕) | ND |
| 425 | 0.875 (0.138, 2) | 89.9 (1.77, 2) | 10.3 (0.951, 2) | 103 (0.221, 2) | >9950 (n=½) | ND |
| 426 | 3.88 (0.200, 2) | 91.2 (3.07, 2) | 29.7 (2.34, 2) | 106 (11.5, 2) | >9950 (n=½) | ND |
| 427 | 2.04 (0.124, 2) | 92.4 (2.27, 2) | 25.1 (5.36, 2) | 109 (1.53, 2) | >9950 (n=½) | ND |
| 428 | 0.748 (0.0265, 2) | 93.6 (1.01, 2) | 10.2 (0.217, 2) | 105 (7.48, 2) | >9950 (n=½) | ND |
| 429 | 1.03 (0.0757, 2) | 93.3 (2.97, 2) | 17.3 (0.623, 2) | 101 (1.10, 2) | >9950 (n=½) | ND |
| 430 | 1.09 (0.108, 2) | 91.5 (4.62, 2) | 26.8 (3.10, 2) | 88.5 (3.34, 2) | >9950 (n=½) | ND |
| 431 | 0.645 (0.0819, 2) | 98.0 (6.44, 2) | 17.5 (0.336, 2) | 91.6 (8.16, 2) | >9950 (n=½) | ND |
| 432 | 0.0875 (0.00975, 5) | 96.7 (2.20, 5) | 1.28 (0.177, 5) | 103 (1.27, 5) | >9950 (n=⅕) | ND |
| 433 | 0.136 (0.0247, 3) | 100.0 (3.94, 3) | 2.63 (0.319, 2) | 101 (5.22, 2) | >9950 (n=⅓) | ND |
| 434 | 0.0994 (0.0113, 5) | 97.5 (2.66, 5) | 1.73 (0.292, 5) | 101 (2.09, 5) | >9950 (n=⅕) | ND |
| 435 | 0.0873 (0.00638, 5) | 98.7 (2.49, 5) | 1.63 (0.153, 5) | 97.8 (2.96, 5) | >9950 (n=⅕) | ND |
| 436 | 0.241 (0.0446, 3) | 96.0 (0.351, 3) | 4.98 (0.430, 3) | 100 (3.07, 3) | >9950 (n=⅓) | ND |
| 437 | 0.461 (0.0212, 2) | 96.5 (2.42, 2) | 9.65 (2.23, 2) | 91.2 (10.9, 2) | >9950 (n=½) | ND |
| 438 | 0.592 (0.100, 2) | 90.8 (1.84, 2) | 28.0 (1.64, 2) | 88.7 (20.6, 2) | >9950 (n=½) | ND |
| 439 | 0.396 (0.0386, 3) | 91.7 (2.17, 3) | 9.25 (2.51, 3) | 97.0 (5.24, 3) | >9950 (n=⅓) | ND |
| 440 | 0.209 (0.0138, 6) | 90.3 (1.85, 6) | 2.74 (0.115, 6) | 106 (1.98, 6) | >10100 (n=⅙) | ND |
| 441 | 1.38 (0.172, 4) | 83.8 (2.04, 4) | 5.75 (0.561, 4) | 111 (3.26, 4) | >9950 (n=¼) | ND |
| 442 | 0.687 (0.179, 3) | 92.1 (4.96, 3) | 7.63 (2.89, 3) | 106 (1.76, 3) | >9950 (n=⅓) | ND |
| 443 | 12.2(1.51, 2) | 91.1 (1.74, 2) | 133 (5.04, 2) | 99.3 (0.923, 2) | >9950 (n=½) | ND |
| 444 | 0.570 (0.0249, 2) | 83.6 (0.143, 2) | 7.51 (1.10, 2) | 98.8 (2.42, 2) | >9950 (n=½) | ND |
| 445 | 1.17 (0.102, 2) | 91.4 (0.322, 2) | 13.1 (0.359, 2) | 100 (0.430, 2) | >9950 (n=½) | ND |
| 446 | 5.14(1.45, 3) | 97.0 (4.46, 3) | 33.5 (2.16, 3) | 105 (1.85, 3) | >9950 (n=⅓) | ND |
| 447 | 1.46 (0.413, 3) | 101 (2.70, 3) | 7.85 (0.457, 3) | 98.4 (2.10, 3) | >9950 (n=⅓) | ND |
| 448 | 1.41 (0.531, 3) | 99.2 (0.884, 3) | 7.91 (0.258, 3) | 99.5 (1.45, 3) | >9950 (n=⅓) | ND |
| 449 | 0.595 (0.0397, 5) | 92.1 (4.58, 5) | 7.27 (0.337, 5) | 103 (5.19, 5) | >9950 (n=⅕) | ND |
| 450 | 2.44 (0.532, 5) | 91.4 (4.33, 5) | 32.3 (4.94, 5) | 102 (6.79, 5) | >9950 (n=⅕) | ND |
| 451 | 0.518 (0.103, 5) | 89.5 (2.84, 5) | 7.23 (0.798, 5) | 108 (5.40, 5) | >9950 (n=⅕) | ND |
| 452 | 1.21 (0.251, 3) | 100 (1.68, 3) | 16.8 (2.48, 3) | 108 (2.85, 3) | >9950 (n=⅓) | ND |
| 453 | 0.451 (0.0791, 5) | 92.0 (0.901, 5) | 5.47 (0.327, 5) | 108 (3.80, 5) | >9950 (n=⅕) | ND |
| 454 | 1.30 (0.201, 4) | 91.5 (0.474, 4) | 18.6(1.80, 4) | 103 (1.41, 4) | >9950 (n=¼) | ND |
| 455 | 0.362 (0.0529, 5) | 91.8 (1.84, 5) | 5.24 (0.295, 5) | 108 (2.00, 5) | >9950 (n=⅕) | ND |
| 456 | 0.878 (0.170, 3) | 94.7 (3.21, 3) | 14.7(1.55, 3) | 112 (5.14, 3) | >9950 (n=⅓) | ND |
| 457 | 0.334 (0.0519, 4) | 92.7 (3.24, 4) | 4.69 (1.37, 4) | 103 (3.76, 4) | >9950 (n=¼) | ND |
| 458 | 0.726 (0.0737, 4) | 93.1 (2.31, 4) | 7.61 (0.921, 4) | 106 (2.53, 4) | >9950 (n=¼) | ND |
| 459 | 0.323 (0.0736, 4) | 89.3 (1.16, 4) | 4.87 (0.929, 4) | 104 (2.02, 4) | >9950 (n=¼) | ND |
| 460 | 0.506 (0.0729, 4) | 89.5 (3.45, 4) | 6.31 (0.982, 4) | 99.5 (3.37, 4) | >9950 (n=¼) | ND |
| 461 | 0.247 (0.0520, 4) | 98.5 (0.822, 4) | 2.76 (0.361, 4) | 105 (2.29, 4) | >10100 (n=¼) | ND |
| 462 | 0.317 (0.0572, 3) | 98.4 (2.45, 3) | 3.34 (0.719, 3) | 104 (2.72, 3) | >9950 (n=⅓) | ND |
| 463 | 0.350 (0.0916, 3) | 93.7 (3.44, 3) | 4.09 (0.287, 2) | 103 (7.01, 2) | >9950 (n=⅓) | ND |
| 464 | 0.316 (0.0436, 4) | 95.5 (4.97, 4) | 4.48 (0.715, 4) | 104 (5.47, 4) | >10100 (n=¼) | ND |
| 465 | 3.63 (0.920, 3) | 94.4 (1.30, 3) | 73.2 (8.31, 3) | 93.3 (9.91, 3) | >9950 (n=⅓) | ND |
| 466 | 0.314 (0.0445, 2) | 93.4 (2.04, 2) | 3.32 (0.194, 2) | 99.8 (9.14, 2) | >10100 (n=½) | ND |
| 467 | 0.35 | 88.4 | 2.87 | 97.9 | >10100 (n=½) | ND |
| 468 | 0.222 | 85.9 | 1.84 | 102 | >10100 (n=½) | ND |
| 469 | 0.203 | 82.1 | 2.33 | 93.8 | >9950 (n=½) | ND |
| 470 | 0.719 | 93.9 | 4.54 | 113 | >9950 (n=½) | ND |
| 471 | 0.568 | 90.1 | 4.36 | 110 | >9950 (n=½) | ND |
| 472 | 0.663 | 76.3 | 7.41 | 103 | >9950 (n=½) | ND |
| 473 | 0.979 | 92.8 | 7.07 | 114 | >9950 (n=½) | ND |
| 474 | 0.156 | 85.6 | 1.1 | 104 | >9950 (n=½) | ND |
| 475 | 0.211 | 84.6 | 1.44 | 102 | >9950 (n=½) | ND |
| 476 | 0.154 | 81.8 | 1.5 | 107 | >9950 (n=½) | ND |
| 477 | 0.163 | 88.1 | 1.56 | 110 | >9950 (n=½) | ND |
| 478 | 0.517 | 84 | 6.16 | 108 | >9950 | ND |
| 479 | 0.196 | 89.5 | 2.55 | 95.3 | >9950 | ND |
| 480 | 0.29 | 99.7 | 2.65 | 104 | >9950 | ND |
| 481 | 0.467 | 82.7 | 6.16 | 112 | >9950 | ND |
| 482 | 0.89 | 104 | 4.85 | 110 | >9950 (n=½) | ND |
| 483 | 0.297 | 92.6 | 3.33 | 113 | >9950 (n=½) | ND |
| 484 | 0.453 | 91.3 | 3.66 | 103 | >9950 (n=½) | ND |
| 485 | 0.536 | 93.8 | 3.9 | 104 | >9950 | ND |
| 486 | 0.239 | 88.2 | 2 | 102 | >9950 (n=½) | ND |
| 487 | 0.429 | 89.1 | 3.16 | 104 | >9950 (n=½) | ND |
| 488 | 0.718 (0.161, 2) | 85.5 (1.49, 2) | 13.0 (0.709, 2) | 106 (4.29, 2) | >9950 (n=⅓) | ND |
| 489 | 0.578 | 79.4 | 13.5 | 98.7 | >9950 | ND |
| 490 | 0.976 | 97.1 | 7.68 | 101 | >9950 | ND |
| 491 | 1.08 | 87.5 | 5.51 | 105 | >9950 | ND |
| 492 | 0.371 | 88.7 | 4.31 | 104 | >9950 (n=½) | ND |
| 493 | 0.591 | 94.6 | 7.24 | 102 | >9950 | ND |
| 494 | 0.699 (0.0883, 4) | 92.6 (3.07, 4) | 9.17 (1.83, 4) | 106 (3.43, 4) | >9950 (n=¼) | ND |

ND = Not Determined
^{a} Expression density is determined using homologous competition binding of [¹²⁵I]GLP-1(7-36)NH₂ at hGLP-1R (112 fmol/mg protein), [¹²⁵I]GCG at hGCGR (98 fmol/mg protein) and [¹²⁵I]GIP(1-42) at hGIPR (124 fmol/mg protein).
^{b} EC₅₀, nM = the Geometric Mean, followed by the Standard Error of the Mean and the number of observations in parenthesis.
^{c} Eₘₐₓ, % = the Arithmetic Mean ± the Standard Error of the Mean for the percent of maximal response to GLP-1(7-36)NH₂ at hGLP-1R, GCG at hGCGR or GIP(1-42)NH₂ athGIPR.
All values shown are to three (3) significant digits.

### IN VIVO STUDIES

### Pharmacokinetics in Male CD-1 Mice

[0315] The pharmacokinetics of a test peptide is evaluated following a single subcutaneous administration of 200 nMol/kg to male CD-1 mice. Blood samples are collected over 168 hours and resulting individual plasma concentrations are used to calculate pharmacokinetic parameters. Plasma (K₃ EDTA) concentrations are determined using a qualified LC/MS method that measures the intact mass of the test peptide. Each test peptide and an analog as an internal standard are extracted from 100% mouse plasma using immunoaffinity based precipitation with anti-GIP/GLP1 antibodies. Instruments are combined for LC/MS detection. Mean pharmacokinetic parameters determine if the test peptide is consistent with an extended pharmacokinetic profile.

### Insulin Secretion in Male Wistar Rats

[0316] Male Wistar rats with femoral artery and femoral vein canulas (Envigo, Indianapolis, IN) (280- 320 grams) are single-housed in polycarbonate cages with filter tops. Rats maintained on a 12:12 h light-dark cycle (lights on at 6:00 A.M.) at 21° C. and receive food and deionized water ad libitum. Rats are randomized by body weight and dosed 1.5 ml/kg s.c. at test peptide doses of 0.04, 0.1, 0.3, 1, 3, and 10 nmol/kg 16 hours prior to glucose administration then fasted. Animals are weighed and anesthetized with sodium pentobarbital dosed i.p. (65 mg/kg, 30 mg/ml). A time 0 blood sample is collected into EDTA tubes after which glucose is administered i.v. (0.5 mg/kg, 5 ml/kg). Blood samples are collected for glucose and insulin levels at time 2, 4, 6, 10, 20 and 30 min post intravenous administration of glucose. Plasma glucose levels are determined using a clinical chemistry analyzer. Plasma insulin is determined using an electrochemiluminescence assay (Meso Scale, Gaithersburg, MD). Glucose and insulin AUC are examined compared to the vehicle control with n = 5 animals per group. Results are presented (SEM)(N). Results show the test peptide effect on insulin secretion during intravenous glucose tolerance test. Results show test peptide dose dependent effect on insulin secretion.

### Diet-Induced Obese C57/B16 Mice

[0317] C57/Bl6 diet-induced obese (DIO) male mice (Taconic, Germantown, NY) weighing 41-50 g are used. Animals are individually housed in a temperature-controlled (24° C.) facility with a 12 hour light/dark photoperiod (lights off at 10:00 AM and lights on at 10:00 PM), with free access to food and water. After 2 week acclimatization to the facility, mice are randomized to treatment groups (n=6/group) based on body weight so each group has similar starting mean body weight.

[0318] Mice are treated with either vehicle (40 mM Tris-HCl at pH 8.0) or a test peptide between the dose range of about 0.03 nmol/kg to about 10 nmol/kg. Treatments are subcutaneously administered to ad libitum fed DIO mice 30-90 minutes prior to the onset of the dark cycle daily (QD) for 14 days. Monitor body weight and food intake daily.

[0319] Data are expressed as mean ± SEM of 5-6 rats per group. Statistical analyses are assessed by one-way ANOVA followed by Dunnett’s multiple comparison test to compare treatment groups to vehicle group or each other. Significant differences are identified at p<0.05.

$$\begin{matrix}\text{Percent Body Weight} = \\ \frac{\text{Body weight after 14-day treatment}}{\text{Body weight before treatment started}} \times \text{100}\end{matrix}$$

[0320] “0” dose group represents the vehicle-treated mice during each study. All data are expressed as mean ± SEM of 5-6 mice per group. “Δ from vehicle” refers to difference between body weight at day 15 between test and vehicle groups. “% change” refers to percent decrease in body weight between days 1 and 15 in test groups. Record percent decrease in body weight for animals receiving vehicle. The Δ from vehicle and % change data are statistically significantly different (p<0.05) than control for a peptide testing positive in the assay.

### Amino Acid Sequences

[0321] SEQ ID NO: 1 GIP (Human)

YAEGTFISDYSIAMDKIHQQDFVNWLLAQKGKKNDWKHNITQ-NH₂

[0322] SEQ ID NO:2 Glucagon (Human)

HSQGTFTSDYSKYLDSRRAQDFVQWLMNT

[0323] SEQ ID NO:3 GLP-1 (7-36) (Human)

HAEGTFTSDVSSYLEGQAAKEFIAWLVKGR-NH₂

[0324] SEQ ID NO:4

X₁X₂EGTX₆TSDX₁₀X₁₁X₁₂X₁₃LDX₁₆X₁₇AQX₂₀X₂₁X₂₂IX₂₄X₂₅
LIX₂₈GX₃₀

[0325] SEQ ID NO:5

X₃₁SSG

[0326] SEQ ID NO:6

X₃₁SSG-R₃

[0327] SEQ ID NO:7

X₃₁SSGX₃₅PPPX₃₉

[0328] SEQ ID NO:8

X₃₁SSGX₃₅PPPX₃₉R₃

[0329] SEQ ID NO:9

X₃₁SSGX₃₅PPPX₃₉X₄₀

[0330] SEQ ID NO:10

X₃₁SSGX₃₅PPPX₃₉X₄₀R₃

[0331] SEQ ID NO:11

Y-Aib-EGT-αMeF(2F)-TSD-4Pal-SI-αMeL-LD-Orn-K((2-[2
-(2-Amino-ethoxy)-ethoxy]-acetyl)₂-(γ-Glu)-CO-(CH₂
)₁₂-CO₂H)AQ-Aib-EFI-(D-Glu)-αMeY-LIEGGK((2-[2-(2-A
mino-ethoxy)-ethoxy]-acetyl)₂-(γ-Glu)-CO-(CH₂)₁₂-C
O₂H)SSGAPPPS-NH₂

[0332] SEQ ID NO:12

Y-Aib-EGT-αMeF(2F)-TSD-4Pal-SI-αMeL-LD-Orn-K((2-[2
-(2-Amino-ethoxy)-ethoxy]-acetyl)₂-(γ-Glu)-(10-(4-
carboxyphenoxy)decanoyl))AQ-Aib-EFI-(D-Glu)-αMeY-L
IEGGK((2-[2-(2-Amino-ethoxy)-ethoxy]-acetyl)₂-(γ-G
lu)-(10-(4-carboxyphenoxy)decanoyl))SSGAPPPS-NH₂

[0333] SEQ ID NO:13

Y-Aib-EGT-αMeF(2F)-TSD-4Pal-SI-αMeL-LD-Orn-K((2-[2
-(2-Amino-ethoxy)-ethoxy]-acetyl)₂-(γ-Glu)-(4-(4-i
odophenyl)butanoyl))AQ-Aib-EFI-(D-Glu)-αMeY-LIEGGK
((2-[2-(2-Amino-ethoxy)-ethoxy]-acetyl)₂-(γ-Glu)-(
4-(4-iodophenyl)butanoyl))SSGAPPPS-NH₂

[0334] SEQ ID NO:14

Y-Aib-EGT-αMeF(2F)-TSD-4Pal-SI-αMeL-LD-Orn-K((2-[2
-(2-Amino-ethoxy)-ethoxy]-acetyl)₂-(γ-Glu)-(4-(4-t
ert-butylphenyl)butanoyl))AQ-Aib-EFI-(D-Glu)-αMeY-
LIEGGK((2-[2-(2-Amino-ethoxy)-ethoxy]-acetyl)₂-(γ-
Glu)-(4-(4-tert-butylphenyl)butanoyl))SSGAPPPS-NH₂

[0335] SEQ ID NO:15

Y-Aib-EGT-αMeF(2F)-TSD-4Pal-SI-αMeL-LD-Orn-K((2-[2
-(2-Amino-ethoxy)-ethoxy]-acetyl)₂-(γ-Glu)-CO-(CH₂
)₁₀-CH₃)AQ-Aib-EFI-(D-Glu)-αMeY-LIEGGK((2-[2-(2-Am
ino-ethoxy)-ethoxy]-acetyl)₂-(γ-Glu)-CO-(CH₂)₁₀-CH ₃)SSGAPPPS-NH₂

1. A compound of the formula:
X₁X₂EGTX₆TSDX₁₀X₁₁X₁₂X₁₃LDX₁₆X₁₇AQX₂₀X₂₁X₂₂IX₂₄X₂₅LIX₂₈GX₃₀ (SEQ ID NO:505) wherein
X₁ is selected from the group consisting of Y and R₁Y;
R₁ is an Ac modification of the N-terminal amino group;
X₂ is Aib;
X₆ is selected from the group consisting of αMeF and αMeF(2F);
X₁₀ is selected from the group consisting of 4Pal, Y, αMeF, αMeF(2F), αMeL, αMeV, Ac4c, Ac5c, Ac6c, Bip, 1Nal, 2Nal, OMeY, hTyr, Nle, V, 4CPhe, ChG, ChA, Bzt, 2FA, 4TAA, 2TA, 3TA, and KZ₁;
X₁₁ is selected from the group consisting of S, αMeS, Aib, G, Dap, Ac5c, and T1e;
X₁₂ is selected from the group consisting of I and KZ₁;
X₁₃ is selected from the group consisting of αMeL and αMeF;
X₁₆ is Orn;
X₁₇ is selected from the group consisting of Q, I, and KZ₁;
X₂₀ is selected from the group consisting of Aib, Orn, 4Pal, αMeF, Ac5c, and Ac6c;
X₂₁ is selected from the group consisting of E, KZ₁, G, Orn, and 4Pal;
X₂₂ is selected from the group consisting of F, 2ClPhe, 3ClPhe, 2FPhe, 3FPhe, 3,5FPhe, 1Nal, 2Nal, αMeF(2F), ChA, Bzt, and αMeF;
X₂₄ is selected from the group consisting of D-Glu, E, G, and KZ₁;
X₂₅ is selected from the group consisting of Y, αMeY, αMeF, and KZ₁;
X₂₈ is selected from the group consisting of E, Orn, and KZ₁;
X₃₀ is selected from the group consisting of G, Orn, KZ₁, K(Z₁)R₆, OrnR₂, and GR₂;
R₂ is selected from the group consisting of X₃₁, X₃₁SSG(SEQ ID NO:5), X₃₁SSG-R₃ (SEQ ID NO:6), X₃₁SSGX₃₅PPPX₃₉ (SEQ ID NO:7), X₃₁SSGX₃₅PPPX₃₉R₃ (SEQ ID NO:8), X₃₁SSGX₃₅PPPX₃₉X₄₀ (SEQ ID NO:9), X₃₁SSGX₃₅PPPX₃₉X₄₀R₃ (SEQ ID NO: 10), and a modification of the c-terminal group wherein the modification is NH₂; R₆ is selected from the group consisting of PSSG(SEQ ID NO:506), PSSG-R₃ (SEQ ID NO:507), PSSGX₃₅PPPX₃₉ (SEQ ID NO:508), PSSGX₃₅PPPX₃₉R₃ (SEQ ID NO:509), PSSGX₃₅PPPX₃₉X₄₀ (SEQ ID NO:510), PSSGX₃₅PPPX₃₉X₄₀R₃ (SEQ ID NO:511), and a modification of the c-terminal group wherein the modification is NH₂; X₃₁ is selected from the group consisting of P, and KZ₁;
X₃₅ is selected from the group consisting of A and Orn;
X₃₉ is selected from the group consisting of S and Orn;
X₄₀ is KZ₁,
R₃ is a modification of the C-terminal group, wherein the modification is NH₂;
wherein two, and only two, of X₁₀, X₁₂, X₁₇, X₂₁, X₂₄, X₂₅, X₂₈, X₃₀, X₃₁, and X₄₀ are KZ₁ or K(Z₁)R₆;
Z₁ is selected from the group consisting of R₅ and -R₄R₅;
R₄ is a linker; and
R₅ is a fatty acid; or
a pharmaceutically acceptable salt thereof.

2. A compound, or a pharmaceutically acceptable salt thereof, as claimed by claim 1 wherein
X₃₀ is selected from the group consisting of G, Orn, KZ₁, and GR₂; and
R₂ is selected from the group consisting of X₃₁SSG (SEQ ID NO:5), X₃₁SSG-R₃ (SEQ ID NO:6), X₃₁SSGX₃₅PPPX₃₉ (SEQ ID NO:7), X₃₁SSGX₃₅PPPX₃₉R₃ (SEQ ID NO:8), X₃₁SSGX₃₅PPPX₃₉X₄₀ (SEQ ID NO:9), X₃₁SSGX₃₅PPPX₃₉X₄₀R₃ (SEQ ID NO: 10), and a modification of the c-terminal group wherein the modification is NH₂.

3. A compound, or pharmaceutically acceptable salt thereof, as claimed by claim 2, wherein Z₁ is -R₄R₅.

4. A compound, or a pharmaceutically acceptable salt thereof, as claimed by claim 3 wherein R₅ is selected from the group consisting of -CO-(CH₂)₁₂-CO₂H, CO-(CH₂)₁₄-CO₂H, -CO-(CH₂)₁₀-CO₂H, -(10-(4-carboxyphenoxy)decanoyl), -(4-(4-iodophenyl)butanoyl), -(4-(4-tert-butylphenyl)butanoyl), -CO-(CH₂)₁₄-CH₃, -CO-(CH₂)₁₂-CH₃, -CO-(CH₂)₁₀-CH₃, -(7-(4-carboxyphenoxy)heptanoyl), -(11-(4-carboxyphenoxy)undecanoyl), -(12-(4-carboxyphenoxy)dodecanoyl), and -(8-(4-carboxyphenoxy)octanoyl).

5. A compound, or a pharmaceutically acceptable salt thereof, as claimed by claim 3 wherein R₅ is selected from the group consisting of
-CO-(CH₂)₁₂-CO₂H, -CO-(CH₂)₁₀-CO₂H, -(10-(4-carboxyphenoxy)decanoyl), -(4-(4-iodophenyl)butanoyl), -(4-(4-tert-butylphenyl)butanoyl), -CO-(CH₂)₁₄-CH₃, -CO-(CH₂)₁₂-CH₃, -CO-(CH₂)₁₀-CH₃, -(7-(4-carboxyphenoxy)heptanoyl), and -(8-(4-carboxyphenoxy)octanoyl).

6. A compound, or a pharmaceutically acceptable salt thereof, as claimed by claim 3 wherein R₅ is selected from the group consisting of
CO-(CH₂)₁₄-CO₂H, -(11-(4-carboxyphenoxy)undecanoyl), and -(12-(4-carboxyphenoxy)dodecanoyl).

7. A compound, or a pharmaceutically acceptable salt thereof, as claimed by claim 3 wherein R₄ is -(εK)ₐ₁-(γ-Glu)ₐ₂-(2-[2-(2-Amino-ethoxy)-ethoxy]-acetyl)ₐ₃-(εK)b1-(γ-Glu)_{b2}-;
a1 is selected from the group consisting of 0, 1, and 2;
a2 is selected from the group consisting of 0, 1, and 2;
a3 is selected from the group consisting of 0, 1, 2, and 3;
b1 is 0 or 1; and
b2 is 0 or 1.

8. A compound, or a pharmaceutically acceptable salt thereof, as claimed by claim 3 wherein R₄ is selected from the group consisting of
-(2-[2-(2-Amino-ethoxy)-ethoxy]-acetyl)₂-(γ-Glu)-,
-(2-[2-(2-Amino-ethoxy)-ethoxy]-acetyl)₂-,
-(2-[2-(2-Amino-ethoxy)-ethoxy]-acetyl)-(γ-Glu)-,
-(2-[2-(2-Amino-ethoxy)-ethoxy]-acetyl)₂-(γ-Glu)₂)-,
-(2-[2-(2-Amino-ethoxy)-ethoxy]-acetyl)₃-(γ-Glu)-,
-(2-[2-(2-Amino-ethoxy)-ethoxy]-acetyl)₂-(εK)-,
-(2-[2-(2-Amino-ethoxy)-ethoxy]-acetyl)₂-(εK)-(γ-Glu)-,
-(2-[2-(2-Amino-ethoxy)-ethoxy]-acetyl)-(εK)-(γ-Glu)-,
-(2-[2-(2-Amino-ethoxy)-ethoxy]-acetyl)-Trx-(γ-Glu)-,
-(2-[2-(2-Amino-ethoxy)-ethoxy]-acetyl)₂-Trx-(γ-Glu)-,
-(2-[2-(2-Amino-ethoxy)-ethoxy]-acetyl)-Aoc-,
-(2-[2-(2-Amino-ethoxy)-ethoxy]-acetyl)-Aoc-(γ-Glu)-,
-(2-[2-(2-Amino-ethoxy)-ethoxy]-acetyl)-Ahx-(γ-Glu)-,
-PEG3-(γ-Glu)-,
-PEG4-(γ-Glu)-,
-PEG5-(γ-Glu)-,
-PEG6-(γ-Glu)-,
-Ahx-(2-[2-(2-Amino-ethoxy)-ethoxy]-acetyl)-(γ-Glu)-,
-Aoc-(2-[2-(2-Amino-ethoxy)-ethoxy]-acetyl)-(γ-Glu)-,
-(εK)-(2-[2-(2-Amino-ethoxy)-ethoxy]-acetyl)-(γ-Glu)-,
-(εK)-(2-[2-(2-Amino-ethoxy)-ethoxy]-acetyl)₂-(γ-Glu)-,
-(εK)-(γ-Glu)-,
-(εK)-(γ-Glu)-(γ-Glu)-,
-(γ-Glu)-(2-[2-(2-Amino-ethoxy)-ethoxy]-acetyl)₂-,
-(εK)-(εK)-(γ-Glu)-,
-(γ-Glu)-(2-[2-(2-Amino-ethoxy)-ethoxy]-acetyl)-,
-(γ-Glu)-(2-[2-(2-Amino-ethoxy)-ethoxy]-acetyl)₂-(γ-Glu)-,
-(2-[2-(2-Amino-ethoxy)-ethoxy]-acetyl)-(γ-Glu)-(2-[2-(2-Amino-ethoxy)-ethoxy]-acetyl)-,
-(2-[2-(2-Amino-ethoxy)-ethoxy]-acetyl)₂-(γ-Glu)-(2-[2-(2-Amino-ethoxy)-ethoxy]-acetyl)-,
-(2-[2-(2-Amino-ethoxy)-ethoxy]-acetyl)-(y-Glu)-(2-[2-(2-Amino-ethoxy)-ethoxy]-acetyl)₂-, and
(2-[2-(2-Amino-ethoxy)-ethoxy]-acetyl)-(y-Glu)-(2-[2-(2-Amino-ethoxy)-ethoxy]-acetyl)-(γ-Glu)-.

9. A compound, or a pharmaceutically acceptable salt thereof, as claimed by claim 3 wherein R₄ is selected from the group consisting of
-(2-[2-(2-Amino-ethoxy)-ethoxy]-acetyl)₂-(γ-Glu)-,
-(2-[2-(2-Amino-ethoxy)-ethoxy]-acetyl)₂-,
-(2-[2-(2-Amino-ethoxy)-ethoxy]-acetyl)-(γ-Glu)-,
-(2-[2-(2-Amino-ethoxy)-ethoxy]-acetyl)₃-(γ-Glu)-,
-(2-[2-(2-Amino-ethoxy)-ethoxy]-acetyl)₂-(εK)-,
-(2-[2-(2-Amino-ethoxy)-ethoxy]-acetyl)₂-(εK)-(γ-Glu)-,
-(2-[2-(2-Amino-ethoxy)-ethoxy]-acetyl)-(εK)-(γ-Glu)-,
-(εK)-(2-[2-(2-Amino-ethoxy)-ethoxy]-acetyl)-(γ-Glu)-,
-(εK)-(2-[2-(2-Amino-ethoxy)-ethoxy]-acetyl)₂-(γ-Glu)-,
-(εK)-(γ-Glu)-,
-(εK)-(γ-Glu)-(γ-Glu)-,
-(γ-Glu)-(2-[2-(2-Amino-ethoxy)-ethoxy]-acetyl)₂-,
-(εK)-(εK)-(γ-Glu)-,
-(γ-Glu)-(2-[2-(2-Amino-ethoxy)-ethoxy]-acetyl)-, and
-(2-[2-(2-Amino-ethoxy)-ethoxy]-acetyl)-(γ-Glu)-(2-[2-(2-Amino-ethoxy)-ethoxy]-acetyl)-.

10. A compound, or pharmaceutically acceptable salt thereof, as claimed by claim 2, wherein Z₁ is selected from the group consisting of
-(2-[2-(2-Amino-ethoxy)-ethoxy]-acetyl)₂-(γ-Glu)-CO-(CH₂)₁₂-CO₂H,
-(2-[2-(2-Amino-ethoxy)-ethoxy]-acetyl)₂-(γ-Glu)-CO-(CH₂)₁₀-CO₂H,
-(2-[2-(2-Amino-ethoxy)-ethoxy]-acetyl)₂-(γ-Glu)-(10-(4-carboxyphenoxy)decanoyl),
-(2-[2-(2-Amino-ethoxy)-ethoxy]-acetyl)₂-(γ-Glu)-(4-(4-iodophenyl)butanoyl),
-(2-[2-(2-Amino-ethoxy)-ethoxy]-acetyl)₂-(γ-Glu)-(4-(4-tert-butylphenyl)butanoyl),
-(2-[2-(2-Amino-ethoxy)-ethoxy]-acetyl)₂-(γ-Glu)-CO-(CH₂)₁₄-CH₃,
-(2-[2-(2-Amino-ethoxy)-ethoxy]-acetyl)₂-(γ-Glu)-CO-(CH₂)₁₂-CH₃,
-(2-[2-(2-Amino-ethoxy)-ethoxy]-acetyl)₂-(γ-Glu)-CO-(CH₂)₁₀-CH₃,
-(2-[2-(2-Amino-ethoxy)-ethoxy]-acetyl)₂-CO-(CH₂)₁₂-CO₂H,
-(2-[2-(2-Amino-ethoxy)-ethoxy]-acetyl)₂-(10-(4-carboxyphenoxy)decanoyl),
-(2-[2-(2-Amino-ethoxy)-ethoxy]-acetyl)-(γ-Glu)-CO-(CH₂)₁₂-CO₂H,
-(2-[2-(2-Amino-ethoxy)-ethoxy]-acetyl)-(γ-Glu)-(10-(4-carboxyphenoxy)decanoyl),
-(2-[2-(2-Amino-ethoxy)-ethoxy]-acetyl)-(γ-Glu)-CO-(CH₂)₁₄-CH₃,
-(2-[2-(2-Amino-ethoxy)-ethoxy]-acetyl)-(γ-Glu)-CO-(CH₂)₁₀-CH₃,
-(2-[2-(2-Amino-ethoxy)-ethoxy]-acetyl)₃-(γ-Glu)-CO-(CH₂)₁₂-CO₂H,
-(2-[2-(2-Amino-ethoxy)-ethoxy]-acetyl)₃-(γ-Glu)-CO-(CH₂)₁₄-CH₃,
-(2-[2-(2-Amino-ethoxy)-ethoxy]-acetyl)₂-(εK)-CO-(CH₂)₁₂-CO₂H,
-(2-[2-(2-Amino-ethoxy)-ethoxy]-acetyl)₂-(εK)-(γ-Glu)-CO-(CH₂)₁₂-CO₂H,
-(2-[2-(2-Amino-ethoxy)-ethoxy]-acetyl)-(εK)-(γ-Glu)-CO-(CH₂)₁₂-CO₂H,
-(εK)-(2-[2-(2-Amino-ethoxy)-ethoxy]-acetyl)-(γ-Glu)-CO-(CH₂)₁₂-CO₂H,
-(εK)-(2-[2-(2-Amino-ethoxy)-ethoxy]-acetyl)₂-(γ-Glu)-CO-(CH₂)₁₂-CO₂H,
-(εK)-(γ-Glu)-CO-(CH₂)₁₂-CO₂H,
-(εK)-(γ-Glu)-(γ-Glu)-CO-(CH₂)₁₂-CO₂H,
-(γ-Glu)-(2-[2-(2-Amino-ethoxy)-ethoxy]-acetyl)₂-CO-(CH₂)₁₂-CO₂H,
-(εK)-(εK)-(γ-Glu)-CO-(CH₂)₁₂-CO₂H,
-(γ-Glu)-(2-[2-(2-Amino-ethoxy)-ethoxy]-acetyl)-CO-(CH₂)₁₂-CO₂H,
-(2-[2-(2-Amino-ethoxy)-ethoxy]-acetyl)-(γ-Glu)-(2-[2-(2-Amino-ethoxy)-ethoxy]-acetyl)-CO-(CH₂)₁₂-CO₂H,
-(2-[2-(2-Amino-ethoxy)-ethoxy]-acetyl)₂-(γ-Glu)-(7-(4-carboxyphenoxy)heptanoyl),
-(2-[2-(2-Amino-ethoxy)-ethoxy]-acetyl)₂-(γ-Glu)-(8-(4-carboxyphenoxy)octanoyl),
-(2-[2-(2-Amino-ethoxy)-ethoxy]-acetyl)-(γ-Glu)-(4-(4-tert-butylphenyl)butanoyl),
-(2-[2-(2-Amino-ethoxy)-ethoxy]-acetyl)₂-(γ-Glu)-(11-(4-carboxyphenoxy)undecanoyl),
-(2-[2-(2-Amino-ethoxy)-ethoxy]-acetyl)₃-(γ-Glu)-(10-(4-carboxyphenoxy)decanoyl),
-(2-[2-(2-Amino-ethoxy)-ethoxy]-acetyl)₂-(γ-Glu)-(2-[2-(2-Amino-ethoxy)-ethoxy]-acetyl)-CO-(CH₂)₁₂-CO₂H,
-(2-[2-(2-Amino-ethoxy)-ethoxy]-acetyl)-(γ-Glu)-(2-[2-(2-Amino-ethoxy)-ethoxy]-acetyl)₂-CO-(CH₂)₁₂-CO₂H,
-PEG3-(γ-Glu)-CO-(CH₂)₁₂-CO₂H,
-PEG4-(γ-Glu)-CO-(CH₂)₁₂-CO₂H,
-(2-[2-(2-Amino-ethoxy)-ethoxy]-acetyl)₃-(γ-Glu)-CO-(CH₂)₁₀-CH₃,
-(2-[2-(2-Amino-ethoxy)-ethoxy]-acetyl)₂-(γ-Glu)-(11-(4-carboxyphenoxy)undecanoyl,
-(2-[2-(2-Amino-ethoxy)-ethoxy]-acetyl)₂-(γ-Glu)-CO-(CH₂)₁₄-CO₂H,
-(2-[2-(2-Amino-ethoxy)-ethoxy]-acetyl)-Ahx-(γ-Glu)-CO-(CH₂)₁₂-CO₂H,
-(2-[2-(2-Amino-ethoxy)-ethoxy]-acetyl)-Aoc-(γ-Glu)-CO-(CH₂)₁₂-CO₂H,
-Ahx-(2-[2-(2-Amino-ethoxy)-ethoxy]-acetyl)-(γ-Glu)-CO-(CH₂)₁₂-CO₂H,
-Aoc-(2-[2-(2-Amino-ethoxy)-ethoxy]-acetyl)-(γ-Glu)-CO-(CH₂)₁₂-CO₂H,
-(2-[2-(2-Amino-ethoxy)-ethoxy]-acetyl)-Ahx-(γ-Glu)-(10-(4-carboxyphenoxy)decanoyl),
-(2-[2-(2-Amino-ethoxy)-ethoxy]-acetyl)-Aoc-(γ-Glu)-(10-(4-carboxyphenoxy)decanoyl),
-Ahx-(2-[2-(2-Amino-ethoxy)-ethoxy]-acetyl)-(γ-Glu)-(10-(4-carboxyphenoxy)decanoyl),
-Aoc-(2-[2-(2-Amino-ethoxy)-ethoxy]-acetyl)-(γ-Glu)-(10-(4-carboxyphenoxy)decanoyl),
-PEG4-(γ-Glu)-(10-(4-carboxyphenoxy)decanoyl),
-PEG3-(γ-Glu)-(10-(4-carboxyphenoxy)decanoyl),
-(2-[2-(2-Amino-ethoxy)-ethoxy]-acetyl)-Aoc-CO-(CH₂)₁₂-CO₂H,
-PEG6-(γ-Glu)-CO-(CH₂)₁₂-CO₂H,
-PEG5-(γ-Glu)-CO-(CH₂)₁₂-CO₂H,
-PEG6-(γ-Glu)-(10-(4-carboxyphenoxy)decanoyl),
-PEG5-(γ-Glu)-(10-(4-carboxyphenoxy)decanoyl),
-(2-[2-(2-Amino-ethoxy)-ethoxy]-acetyl)₂-Trx-(γ-Glu)-CO-(CH₂)₁₂-CO₂H,
-(2-[2-(2-Amino-ethoxy)-ethoxy]-acetyl)₂-Trx-(γ-Glu)-(10-(4-carboxyphenoxy)decanoyl),
-(2-[2-(2-Amino-ethoxy)-ethoxy]-acetyl)-Trx-(γ-Glu)-CO-(CH₂)₁₂-CO₂H,
-(2-[2-(2-Amino-ethoxy)-ethoxy]-acetyl)-Trx-(γ-Glu)-(10-(4-carboxyphenoxy)decanoyl),
-(2-[2-(2-Amino-ethoxy)-ethoxy]-acetyl)₂-(γ-Glu)₂-CO-(CH₂)₁₂-CO₂H,
-(2-[2-(2-Amino-ethoxy)-ethoxy]-acetyl)₂-(γ-Glu)₂-(10-(4-carboxyphenoxy)decanoyl),
-(γ-Glu)-(2-[2-(2-Amino-ethoxy)-ethoxy]-acetyl)₂-(γ-Glu)-CO-(CH₂)₁₂-CO₂H,
-(γ-Glu)-(2-[2-(2-Amino-ethoxy)-ethoxy]-acetyl)₂-(γ-Glu)-(10-(4-carboxyphenoxy)decanoyl),
-(2-[2-(2-Amino-ethoxy)-ethoxy]-acetyl)-(γ-Glu)-(2-[2-(2-Amino-ethoxy)-ethoxy]-acetyl)-(γ-Glu)-CO-(CH₂)₁₂-CO₂H, and
-(2-[2-(2-Amino-ethoxy)-ethoxy]-acetyl)-(γ-Glu)-(2-[2-(2-Amino-ethoxy)-ethoxy]-acetyl)-(γ-Glu)-(10-(4-carboxyphenoxy)decanoyl).

11. A compound, or a pharmaceutically acceptable salt thereof, as claimed by claim 10 wherein Z₁ is selected from the group consisting of:
-(2-[2-(2-Amino-ethoxy)-ethoxy]-acetyl)₂-(γ-Glu)-CO-(CH₂)₁₂-CO₂H,
-(2-[2-(2-Amino-ethoxy)-ethoxy]-acetyl)₂-(γ-Glu)-CO-(CH₂)₁₀-CO₂H,
-(2-[2-(2-Amino-ethoxy)-ethoxy]-acetyl)₂-(γ-Glu)-(10-(4-carboxyphenoxy)decanoyl),
-(2-[2-(2-Amino-ethoxy)-ethoxy]-acetyl)₂-(γ-Glu)-(4-(4-iodophenyl)butanoyl),
-(2-[2-(2-Amino-ethoxy)-ethoxy]-acetyl)₂-(γ-Glu)-(4-(4-tert-butylphenyl)butanoyl),
-(2-[2-(2-Amino-ethoxy)-ethoxy]-acetyl)₂-(γ-Glu)-CO-(CH₂)₁₄-CH₃,
-(2-[2-(2-Amino-ethoxy)-ethoxy]-acetyl)₂-(γ-Glu)-CO-(CH₂)₁₂-CH₃,
-(2-[2-(2-Amino-ethoxy)-ethoxy]-acetyl)₂-(γ-Glu)-CO-(CH₂)₁₀-CH₃,
-(2-[2-(2-Amino-ethoxy)-ethoxy]-acetyl)₂-CO-(CH₂)₁₂-CO₂H,
-(2-[2-(2-Amino-ethoxy)-ethoxy]-acetyl)₂-(10-(4-carboxyphenoxy)decanoyl),
-(2-[2-(2-Amino-ethoxy)-ethoxy]-acetyl)-(γ-Glu)-CO-(CH₂)₁₂-CO₂H,
-(2-[2-(2-Amino-ethoxy)-ethoxy]-acetyl)-(γ-Glu)-(10-(4-carboxyphenoxy)decanoyl),
-(2-[2-(2-Amino-ethoxy)-ethoxy]-acetyl)-(γ-Glu)-CO-(CH₂)₁₄-CH₃,
-(2-[2-(2-Amino-ethoxy)-ethoxy]-acetyl)-(γ-Glu)-CO-(CH₂)io-CH₃,
-(2-[2-(2-Amino-ethoxy)-ethoxy]-acetyl)₃-(γ-Glu)-CO-(CH₂)₁₂-CO₂H,
-(2-[2-(2-Amino-ethoxy)-ethoxy]-acetyl)₃-(γ-Glu)-CO-(CH₂)₁₄-CH₃,
-(2-[2-(2-Amino-ethoxy)-ethoxy]-acetyl)₂-(εK)-CO-(CH₂)₁₂-CO₂H,
-(2-[2-(2-Amino-ethoxy)-ethoxy]-acetyl)₂-(εK)-(γ-Glu)-CO-(CH₂)₁₂-CO₂H,
-(2-[2-(2-Amino-ethoxy)-ethoxy]-acetyl)-(εK)-(γ-Glu)-CO-(CH₂)₁₂-CO₂H,
-(εK)-(2-[2-(2-Amino-ethoxy)-ethoxy]-acetyl)-(γ-Glu)-CO-(CH₂)₁₂-CO₂H,
-(εK)-(2-[2-(2-Amino-ethoxy)-ethoxy]-acetyl)₂-(γ-Glu)-CO-(CH₂)₁₂-CO₂H,
-(εK)-(γ-Glu)-CO-(CH₂)₁₂-CO₂H,
-(εK)-(γ-Glu)-(γ-Glu)-CO-(CH₂)₁₂-CO₂H,
-(γ-Glu)-(2-[2-(2-Amino-ethoxy)-ethoxy]-acetyl)₂-CO-(CH₂)₁₂-CO₂H,
-(εK)-(εK)-(γ-Glu)-CO-(CH₂)₁₂-CO₂H,
-(γ-Glu)-(2-[2-(2-Amino-ethoxy)-ethoxy]-acetyl)-CO-(CH₂)₁₂-CO₂H,
-(2-[2-(2-Amino-ethoxy)-ethoxy]-acetyl)-(y-Glu)-(2-[2-(2-Amino-ethoxy)-ethoxy]-acetyl)-CO-(CH₂)₁₂-CO₂H,
-(2-[2-(2-Amino-ethoxy)-ethoxy]-acetyl)₂-(γ-Glu)-(7-(4-carboxyphenoxy)heptanoyl),
-(2-[2-(2-Amino-ethoxy)-ethoxy]-acetyl)₂-(γ-Glu)-(8-(4-carboxyphenoxy)octanoyl), and
-(2-[2-(2-Amino-ethoxy)-ethoxy]-acetyl)-(y-Glu)-(4-(4-tert-butylphenyl)butanoyl).

12. A compound, or a pharmaceutically acceptable salt thereof, as claimed by claim 10 wherein Z₁ is selected from the group consisting of:
-(2-[2-(2-Amino-ethoxy)-ethoxy]-acetyl)₂-(γ-Glu)-(11-(4-carboxyphenoxy)undecanoyl),
-(2-[2-(2-Amino-ethoxy)-ethoxy]-acetyl)₃-(γ-Glu)-(10-(4-carboxyphenoxy)decanoyl),
-(2-[2-(2-Amino-ethoxy)-ethoxy]-acetyl)₂-(γ-Glu)-(2-[2-(2-Amino-ethoxy)-ethoxy]-acetyl)-CO-(CH₂)₁₂-CO₂H,
-(2-[2-(2-Amino-ethoxy)-ethoxy]-acetyl)-(γ-Glu)-(2-[2-(2-Amino-ethoxy)-ethoxy]-acetyl)₂-CO-(CH₂)₁₂-CO₂H,
-PEG3-(γ-Glu)-CO-(CH₂)₁₂-CO₂H,
-PEG4-(γ-Glu)-CO-(CH₂)₁₂-CO₂H,
-(2-[2-(2-Amino-ethoxy)-ethoxy]-acetyl)₃-(γ-Glu)-CO-(CH₂)₁₀-CH₃,
-(2-[2-(2-Amino-ethoxy)-ethoxy]-acetyl)₂-(γ-Glu)-(11-(4-carboxyphenoxy)undecanoyl,
-(2-[2-(2-Amino-ethoxy)-ethoxy]-acetyl)₂-(γ-Glu)-CO-(CH₂)₁₄-CO₂H,
-(2-[2-(2-Amino-ethoxy)-ethoxy]-acetyl)-Ahx-(γ-Glu)-CO-(CH₂)₁₂-CO₂H,
-(2-[2-(2-Amino-ethoxy)-ethoxy]-acetyl)-Aoc-(γ-Glu)-CO-(CH₂)₁₂-CO₂H,
-Ahx-(2-[2-(2-Amino-ethoxy)-ethoxy]-acetyl)-(γ-Glu)-CO-(CH₂)₁₂-CO₂H,
-Aoc-(2-[2-(2-Amino-ethoxy)-ethoxy]-acetyl)-(γ-Glu)-CO-(CH₂)₁₂-CO₂H,
-(2-[2-(2-Amino-ethoxy)-ethoxy]-acetyl)-Ahx-(γ-Glu)-(10-(4-carboxyphenoxy)decanoyl),
-(2-[2-(2-Amino-ethoxy)-ethoxy]-acetyl)-Aoc-(γ-Glu)-(10-(4-carboxyphenoxy)decanoyl),
-Ahx-(2-[2-(2-Amino-ethoxy)-ethoxy]-acetyl)-(γ-Glu)-(10-(4-carboxyphenoxy)decanoyl),
-Aoc-(2-[2-(2-Amino-ethoxy)-ethoxy]-acetyl)-(γ-Glu)-(10-(4-carboxyphenoxy)decanoyl),
-PEG4-(γ-Glu)-(10-(4-carboxyphenoxy)decanoyl),
-PEG3-(γ-Glu)-(10-(4-carboxyphenoxy)decanoyl),
-(2-[2-(2-Amino-ethoxy)-ethoxy]-acetyl)-Aoc-CO-(CH₂)₁₂-CO₂H,
-PEG6-(γ-Glu)-CO-(CH₂)₁₂-CO₂H,
-PEG5-(γ-Glu)-CO-(CH₂)₁₂-CO₂H,
-PEG6-(γ-Glu)-(10-(4-carboxyphenoxy)decanoyl),
-PEG5-(γ-Glu)-(10-(4-carboxyphenoxy)decanoyl),
-(2-[2-(2-Amino-ethoxy)-ethoxy]-acetyl)₂-Trx-(γ-Glu)-CO-(CH₂)₁₂-CO₂H,
-(2-[2-(2-Amino-ethoxy)-ethoxy]-acetyl)₂-Trx-(γ-Glu)-(10-(4-carboxyphenoxy)decanoyl),
-(2-[2-(2-Amino-ethoxy)-ethoxy]-acetyl)-Trx-(γ-Glu)-CO-(CH₂)₁₂-CO₂H,
-(2-[2-(2-Amino-ethoxy)-ethoxy]-acetyl)-Trx-(γ-Glu)-(10-(4-carboxyphenoxy)decanoyl),
-(2-[2-(2-Amino-ethoxy)-ethoxy]-acetyl)₂-(γ-Glu)₂-CO-(CH₂)₁₂-CO₂H,
-(2-[2-(2-Amino-ethoxy)-ethoxy]-acetyl)₂-(γ-Glu)₂-(10-(4-carboxyphenoxy)decanoyl),
-(γ-Glu)-(2-[2-(2-Amino-ethoxy)-ethoxy]-acetyl)₂-(γ-Glu)-CO-(CH₂)₁₂-CO₂H,
-(γ-Glu)-(2-[2-(2-Amino-ethoxy)-ethoxy]-acetyl)₂-(γ-Glu)-(10-(4-carboxyphenoxy)decanoyl),
-(2-[2-(2-Amino-ethoxy)-ethoxy]-acetyl)-(γ-Glu)-(2-[2-(2-Amino-ethoxy)-ethoxy]-acetyl)-(γ-Glu)-CO-(CH₂)₁₂-CO₂H, and
-(2-[2-(2-Amino-ethoxy)-ethoxy]-acetyl)-(γ-Glu)-(2-[2-(2-Amino-ethoxy)-ethoxy]-acetyl)-(γ-Glu)-(10-(4-carboxyphenoxy)decanoyl).

13. A compound, or pharmaceutically acceptable salt thereof, as claimed by claim 1 wherein:
X₁ is Y;
X₆ is αMeF(2F);
X₁₀ is selected from the group consisting of 4Pal, Y, and KZ₁;
X₁₁ is selected from the group consisting of S, αMeS, and Aib;
X₁₂ is I;
X₁₃ is αMeL;
X₁₆ is Orn;
X₁₇ is selected from the group consisting of I and KZ₁;
X₂₀ is Aib;
X₂₁ is E or KZ₁;
X₂₂ is selected from the group consisting of F and αMeF;
X₂₄ is selected from the group consisting of D-Glu and KZ₁;
X₂₅ is αMeY;
X₂₈ is selected from the group consisting of E and KZ₁;
X₃₀ is selected from the group consisting of G and GR₂;
R₂ is selected from the group consisting of X₃₁SSGX₃₅PPPX₃₉ (SEQ ID NO:7),
X₃₁SSGX₃₅PPPX₃₉R₃ (SEQ ID NO:8), and X₃₁SSGX₃₅PPPX₃₉X₄₀ (SEQ ID NO:9), and a modification of the c-terminal group wherein the modification is NH₂;
or a pharmaceutically acceptable salt thereof.

14. A compound or pharmaceutically acceptable salt thereof, as claimed by claim 13 wherein
X₃₀ is GR₂; and
R₂ is selected from the group consisting of X₃₁SSGX₃₅PPPX₃₉ (SEQ ID NO:7), X₃₁SSGX₃₅PPPX₃₉R₃ (SEQ ID NO:8), and X₃₁SSGX₃₅PPPX₃₉X₄₀ (SEQ ID NO:9).

15. A compound, or pharmaceutically acceptable salt thereof, as claimed by claim 13 wherein X₁₇ and X₃₁ are each KZ₁.

16. A compound, or pharmaceutically acceptable salt thereof, as claimed by claim 13 wherein X₁₇ and X₂₄ are each KZ₁.

17. A compound, or pharmaceutically acceptable salt thereof, as claimed by claim 13 wherein X₁₇ and X₂₁ are each KZ₁.

18. A compound, or pharmaceutically acceptable salt thereof, as claimed by claim 13 wherein X₁₇ and X₂₈ are each KZ₁.

19. A compound, or pharmaceutically acceptable salt thereof, as claimed by claim 13 wherein X₂₁ and X₂₈ are each KZ₁.

20. A compound, or pharmaceutically acceptable salt thereof, as claimed by claim 13 wherein X₂₄ and X₂₈ are each KZ₁.

21. A compound, or pharmaceutically acceptable salt thereof, as claimed by claim 13 wherein X₁₇ and X₄₀ are each KZ₁.

22. A compound, or pharmaceutically acceptable salt thereof, as claimed by claim 13 wherein X₂₁ and X₄₀ are each KZ₁.

23. A compound, or pharmaceutically acceptable salt thereof, as claimed by claim 1 wherein the compound is selected from the group consisting of
Y-Aib-EGT-αMeF(2F)-TSD-4Pal-SI-αMeL-LD-Orn-K((2-[2-(2-Amino-ethoxy)-ethoxy]-acetyl)₂-(γ-Glu)-CO-(CH₂)₁₂-CO₂H)AQ-Aib-EFI-(D-Glu)-αMeY-LIEGGK((2-[2-(2-Amino-ethoxy)-ethoxy]-acetyl)₂-(γ-Glu)-CO-(CH₂)₁₂-CO₂H)SSGAPPPS-NH₂,
Y-Aib-EGT-aMeF(2F)-TSD-4Pal-SI-aMeL-LD-Orn-K((2-[2-(2-Amino-ethoxy)-ethoxy]-acetyl)₂-(γ-Glu)-(10-(4-carboxyphenoxy)decanoyl))AQ-Aib-EFI-(D-Glu)-aMeY-LIEGGK((2-[2-(2-Amino-ethoxy)-ethoxy]-acetyl)₂-(γ-Glu)-(10-(4-carboxyphenoxy)decanoyl))SSGAPPPS-NH₂,
Y-Aib-EGT-aMeF(2F)-TSD-4Pal-SI-aMeL-LD-Orn-K((2-[2-(2-Amino-ethoxy)-ethoxy]-acetyl)₂-(γ-Glu)-(4-(4-iodophenyl)butanoyl))AQ-Aib-EFI-(D-Glu)-aMeY-LIEGGK((2-[2-(2-Amino-ethoxy)-ethoxy]-acetyl)₂-(γ-Glu)-(4-(4-iodophenyl)butanoyl))SSGAPPPS-NH₂,
Y-Aib-EGT-aMeF(2F)-TSD-4Pal-SI-aMeL-LD-Orn-K((2-[2-(2-Amino-ethoxy)-ethoxy]-acetyl)₂-(γ-Glu)-(4-(4-tert-butylphenyl)butanoyl))AQ-Aib-EFI-(D-Glu)-aMeY-LIEGGK((2-[2-(2-Amino-ethoxy)-ethoxy]-acetyl)₂-(γ-Glu)-(4-(4-tert-butylphenyl)butanoyl))SSGAPPPS-NH₂, and
Y-Aib-EGT-aMeF(2F)-TSD-4Pal-SI-aMeL-LD-Orn-K((2-[2-(2-Amino-ethoxy)-ethoxy]-acetyl)₂-(γ-Glu)-CO-(CH₂)₁₀-CH3)AQ-Aib-EFI-(D-Glu)-αMeY-LIEGGK((2-[2-(2-Amino-ethoxy)-ethoxy]-acetyl)₂-(γ-Glu)-CO-(CH₂)₁₀-CH₃)SSGAPPPS-NH₂.

24. A compound, or pharmaceutically acceptable salt thereof, as claimed by claim 23 wherein the compound is Y-Aib-EGT-αMeF(2F)-TSD-4Pal-SI-αMeL-LD-Orn-K((2-[2-(2-Amino-ethoxy)-ethoxy]-acetyl)₂-(γ-Glu)-CO-(CH₂)₁₀-CH₃)AQ-Aib-EFI-(D-Glu)-αMeY-LIEGGK((2-[2-(2-Amino-ethoxy)-ethoxy]-acetyl)₂-(γ-Glu)-CO-(CH₂)₁₀-CH₃)SSGAPPPS-NH₂.

25. A compound, or pharmaceutically acceptable salt thereof, as claimed by claim 23 wherein the compound is Y-Aib-EGT-aMeF(2F)-TSD-4Pal-SI-aMeL-LD-Orn-K((2-[2-(2-Amino-ethoxy)-ethoxy]-acetyl)₂-(γ-Glu)-(4-(4-tert-butylphenyl)butanoyl))AQ-Aib-EFI-(D-Glu)-aMeY-LIEGGK((2-[2-(2-Amino-ethoxy)-ethoxy]-acetyl)₂-(γ-Glu)-(4-(4-tert-butylphenyl)butanoyl))SSGAPPPS-NHz.

26. A compound, or pharmaceutically acceptable salt thereof, as claimed by claim 23 wherein the compound is Y-Aib-EGT-aMeF(2F)-TSD-4Pal-SI-aMeL-LD-Orn-K((2-[2-(2-Amino-ethoxy)-ethoxy]-acetyl)₂-(γ-Glu)-(4-(4-iodophenyl)butanoyl))AQ-Aib-EFI-(D-Glu)-aMeY-LIEGGK((2-[2-(2-Amino-ethoxy)-ethoxy]-acetyl)₂-(γ-Glu)-(4-(4-iodophenyl)butanoyl))SSGAPPPS-NH_{2.}

27. A compound, or pharmaceutically acceptable salt thereof, as claimed by claim 23 wherein the compound is Y-Aib-EGT-aMeF(2F)-TSD-4Pal-SI-aMeL-LD-Orn-K((2-[2-(2-Amino-ethoxy)-ethoxy]-acetyl)₂-(γ-Glu)-(10-(4-carboxyphenoxy)decanoyl))AQ-Aib-EFI-(D-Glu)-aMeY-LIEGGK((2-[2-(2-Amino-ethoxy)-ethoxy]-acetyl)₂-(γ-Glu)-(10-(4-carboxyphenoxy)decanoyl))SSGAPPPS-NH₂.

28. A compound, or pharmaceutically acceptable salt thereof, as claimed by claim 23 wherein the compound is Y-Aib-EGT-αMeF(2F)-TSD-4Pal-SI-αMeL-LD-Orn-K((2-[2-(2-Amino-ethoxy)-ethoxy]-acetyl)₂-(γ-Glu)-CO-(CH₂)₁₂-CO₂H)AQ-Aib-EFI-(D-Glu)-αMeY-LIEGGK((2-[2-(2-Amino-ethoxy)-ethoxy]-acetyl)₂-(γ-Glu)-CO-(CH₂)₁₂-CO₂H)SSGAPPPS-NH₂.

29. A method for treating a condition selected from the group consisting of type 2 diabetes mellitus, obesity, NAFLD, nonalcoholic steatohepatitis, dyslipidemia, and metabolic syndrome, comprising administering to a patient in need thereof, an effective amount of a compound, or a pharmaceutically acceptable salt thereof, as claimed by claim 1.

30. A method for treating obesity, comprising administering to a patient in need thereof, an effective amount of a compound, or a pharmaceutically acceptable salt thereof, as claimed by claim 1.

31. A method for providing therapeutic weight loss, comprising administering to a subject in need thereof, an effective amount of a compound, or a pharmaceutically acceptable salt thereof, as claimed by claim 1.

32. A method for treating type 2 diabetes mellitus comprising administering to a subject in need thereof, an effective amount of the compound, or a pharmaceutically acceptable salt thereof, as claimed by claim 1.

33. A pharmaceutical composition comprising the compound, or a pharmaceutically acceptable salt thereof, as claimed by claim 1, and at least one pharmaceutically acceptable carrier, diluent, or excipient.

34. A pharmaceutical composition as claimed by claim 1 wherein the composition is administered as a subcutaneous injection.

35. A pharmaceutical composition as claimed by claim 1 wherein the composition is administered orally.

36. A compound, or a pharmaceutically acceptable salt thereof, as claimed by claim 1 for use as a medicament.

37. A compound, or pharmaceutically acceptable salt thereof, as claimed by claim 1 for use in treating a condition selected from the group consisting of type 2 diabetes mellitus, obesity, NAFLD, nonalcoholic steatohepatitis, dyslipidemia, and metabolic syndrome.

38. A compound, or a pharmaceutically acceptable salt thereof, as claimed by claim 1 for use in treating type 2 diabetes mellitus.

39. The use of a compound, or a pharmaceutically acceptable salt thereof, as claimed by claim 1 in the manufacture of a medicament for treating a condition selected from the group consisting of type 2 diabetes mellitus, obesity, NAFLD, nonalcoholic steatohepatitis, dyslipidemia, and metabolic syndrome.

40. The use of a compound, or a pharmaceutically acceptable salt thereof, as claimed by claim 1 in the manufacture of a medicament for treating type 2 diabetes mellitus.

The application's sequence listing, which the Patent Office published only in electronic form, follows.

SEQUENCE LISTING (511 sequences)

SEQ ID NO: 1 - protein, 42 aa, Homo sapiens
  MOD_RES (42)..(42): Ser at position 42 is amidated
YAEGTFISDYSIAMDKIHQQDFVNWLLAQKGKKNDWKHNITQ

SEQ ID NO: 2 - protein, 29 aa, Homo sapiens
HSQGTFTSDYSKYLDSRRAQDFVQWLMNT

SEQ ID NO: 3 - protein, 30 aa, Homo sapiens
  MOD_RES (30)..(30): Ser at position 30 is amidated
HAEGTFTSDVSSYLEGQAAKEFIAWLVKGR

SEQ ID NO: 4 - protein, 30 aa, Artificial Sequence
  Synthetic Construct; a compound of Formula II
  MISC_FEATURE (1)..(1): Xaa at position in is Y or R1-Y, wherein R1 is an Ac modification of the N-terminal amino group
  MISC_FEATURE (2)..(2): Xaa at position 2 is Aib
  MISC_FEATURE (6)..(6): Xaa at position 6 is alpha-methyl-F or alpha-methyl-F(2F)
  MISC_FEATURE (10)..(10): Xaa at position 10 is K, 4Pal, Y, alpha-methyl-F, alpha-methyl-F(2F), alpha-methyl-L, alpha-methyl-V, Ac4c, Ac5c, Ac6c, Bip, 1Nal, 2Nal, OMeY, hTyr, Nle, V, 4CPhe, ChG, ChA, Bzt, 2FA, 4TAA, 2TA, 3TA, or KZ1
  MISC_FEATURE (11)..(11): Xaa at position 11 is Ac5c, S, alpha-methyl-S, Aib, G, Dap, or Tle
  MISC_FEATURE (12)..(12): Xaa at position 12 is I or KZ1
  MISC_FEATURE (13)..(13): Xaa at position 13 is alpha-methyl-MeL or alpha-methyl-F
  MISC_FEATURE (16)..(16): Xaa at position 16 is Orn
  MISC_FEATURE (17)..(17): Xaa at position 17 is Q, I, or KZ1
  MISC_FEATURE (20)..(20): Xaa at position 20 is Aib, Orn, 4Pal, alpha-methyl-F, Ac5c, or Ac6c
  MISC_FEATURE (21)..(21): Xaa at position 21 is E, KZ1, G, Orn, or 4Pal
  MISC_FEATURE (22)..(22): Xaa at position 22 is F, 2ClPhe, 3ClPhe, 2FPhe, 3FPhe, 3,5FPhe, 1Nal, 2Nal, alpha-methyl-F(2F), ChA, Bzt, or alpha-methyl-F
  MISC_FEATURE (24)..(24): Xaa at position 24 is D-Glu, E, G, or KZ1
  MISC_FEATURE (25)..(25): Xaa at position 25 is Y, alpha-methyl-Y, alpha-methyl-F, or KZ1
  MISC_FEATURE (28)..(28): Xaa at position 28 is E, Orn, or KZ1
  MISC_FEATURE (30)..(30): Xaa at position 30 is G, Orn, KZ1, or GR2, and a modification of the c-terminal group wherein the modification is NH2
  MISC_FEATURE (30)..(30): When Xaa at position 30 is GR2, then R2 is SEQ ID NO:5, SEQ ID NO:6, SEQ ID NO:7, SEQ ID NO:8, SEQ ID NO:9, or SEQ ID NO:10
  MISC_FEATURE (30)..(30): When Xaa at position 30 is KZ1, Z1 is R5 or R4R5, wherein R4 is a linker and R5 is a fatty acid
XXEGTXTSDXXXXLDXXAQXXXIXXLIXGX

SEQ ID NO: 5 - protein, 4 aa, Artificial Sequence
  Synthetic Construct
  MISC_FEATURE (1)..(1): Xaa at position 1 is P or KZ1
XSSG

SEQ ID NO: 6 - protein, 4 aa, Artificial Sequence
  Synthetic Construct
  MISC_FEATURE (1)..(1): Xaa at position 1 is P or KZ1
  MOD_RES (4)..(4): Xaa at position 4 is modified with R3, where R3 is is a modification of the C-terminal group, wherein the modification is NH2
XSSG

SEQ ID NO: 7 - protein, 9 aa, Artificial Sequence
  Synthetic Construct
  MISC_FEATURE (1)..(1): Xaa at position 1 is P or KZ1
  MISC_FEATURE (5)..(5): Xaa at position 5 is A or Orn
  MISC_FEATURE (9)..(9): Xaa at position 9 is S or Orn
XSSGXPPPX

SEQ ID NO: 8 - protein, 9 aa, Artificial Sequence
  Synthetic Construct
  MISC_FEATURE (1)..(1): Xaa at position 1 is P or KZ1
  MISC_FEATURE (5)..(5): Xaa at position 5 is A or Orn
  MISC_FEATURE (9)..(9): Xaa at position 9 is S or Orn
  MOD_RES (9)..(9): Xaa at position 9 is modified with R3, where R3 is is a modification of the C-terminal group, wherein the modification is NH2
XSSGXPPPX

SEQ ID NO: 9 - protein, 10 aa, Artificial Sequence
  Synthetic Construct
  MISC_FEATURE (1)..(1): Xaa at position 1 is P or KZ1
  MISC_FEATURE (5)..(5): Xaa at position 5 is A or Orn
  MISC_FEATURE (9)..(9): Xaa at position 9 is S or Orn
  MISC_FEATURE (10)..(10): Xaa at position 10 is KZ1
XSSGXPPPXX

SEQ ID NO: 10 - protein, 10 aa, Artificial Sequence
  Synthetic Construct
  MISC_FEATURE (1)..(1): Xaa at position 1 is P or KZ1
  MISC_FEATURE (5)..(5): Xaa at position 5 is A or Orn
  MISC_FEATURE (9)..(9): Xaa at position 9 is S or Orn
  MISC_FEATURE (10)..(10): Xaa at position 10 is KZ1
  MOD_RES (10)..(10): Xaa at position 10 is modified with R3, where R3 is is a modification of the C-terminal group, wherein the modification is NH2
XSSGXPPPXX

SEQ ID NO: 11 - protein, 39 aa, Artificial Sequence
  Synthetic Construct
  MISC_FEATURE (2)..(2): Xaa at position 2 is Aib
  MISC_FEATURE (6)..(6): Xaa at position 6 is alpha-methyl-F(2F)
  MISC_FEATURE (10)..(10): Xaa at position 10 is 4Pal
  MISC_FEATURE (13)..(13): Xaa at position 13 is alpha-methyl-Leu
  MISC_FEATURE (16)..(16): Xaa at position 16 is Orn
  MOD_RES (17)..(17): Lys at position 17 is chemically modified by conjugation of the epsilon-amino group of the Lys side chain with (2-[2-(2-amino-ethoxy)-ethoxy]-acetyl)2-(gamma-Glu)-CO-(CH2)12-CO 2H
  MISC_FEATURE (20)..(20): Xaa at position 20 is Aib
  MISC_FEATURE (24)..(24): Xaa at position 24 is D-Glu
  MISC_FEATURE (25)..(25): Xaa at position 25 is alpha-methyl-Tyr
  MOD_RES (31)..(31): Lys at position 31 is chemically modified by conjugation of the epsilon-amino group of the Lys side chain with (2-[2-(2-amino-ethoxy)-ethoxy]-acetyl)2-(gamma-Glu)-CO-(CH2)12-CO 2H
  MOD_RES (39)..(39): Ser at position 39 is amidated
YXEGTXTSDXSIXLDXKAQXEFIXXLIEGGKSSGAPPPS

SEQ ID NO: 12 - protein, 39 aa, Artificial Sequence; identical to SEQ ID NO: 11
  Synthetic Construct
  MISC_FEATURE (2)..(2): Xaa at position 2 is Aib
  MISC_FEATURE (6)..(6): Xaa at position 6 is alpha-methyl-F(2F)
  MISC_FEATURE (10)..(10): Xaa at position 10 is 4Pal
  MISC_FEATURE (13)..(13): Xaa at position 13 is alpha-methyl-L
  MISC_FEATURE (16)..(16): Xaa at position 16 is Orn
  MOD_RES (17)..(17): Lys at position 17 is chemically modified by conjugation of the epsilon-amino group of the Lys side chain with (2-[2-(2-Amino-ethoxy)-ethoxy]-acetyl)2-(gamma-Glu)-(10-(4-carbox yphenoxy)decanoyl)
  MISC_FEATURE (20)..(20): Xaa at position 20 is Aib
  MISC_FEATURE (24)..(24): Xaa at position 24 is D-Glu
  MISC_FEATURE (25)..(25): Xaa at position 25 is alpha-methyl-Tyr
  MOD_RES (31)..(31): Lys at position 31 is chemically modified by conjugation of the epsilon-amino group of the Lys side chain with (2-[2-(2-Amino-ethoxy)-ethoxy]-acetyl)2-(gamma-Glu)-(10-(4-carbox yphenoxy)decanoyl)
  MOD_RES (39)..(39): Ser at position 39 is amidated

SEQ ID NO: 13 - protein, 39 aa, Artificial Sequence; identical to SEQ ID NO: 11
  Synthetic Construct
  MISC_FEATURE (2)..(2): Xaa at position 2 is Aib
  MISC_FEATURE (6)..(6): Xaa at position 6 is alpha-methyl-F(2F)
  MISC_FEATURE (10)..(10): Xaa at position 10 is 4Pal
  MISC_FEATURE (13)..(13): Xaa at position 13 is alpha-methyl-Leu
  MISC_FEATURE (16)..(16): Xaa at position 16 is Orn
  MOD_RES (17)..(17): Lys at position 17 is chemically modified by conjugation of the epsilon-amino group of the Lys side chain with (2-[2-(2-Amino-ethoxy)-ethoxy]-acetyl)2-(gamma-Glu)-(4-(4-iodophe nyl)butanoyl)
  MISC_FEATURE (20)..(20): Xaa at position 20 is Aib
  MISC_FEATURE (24)..(24): Xaa at position 24 is D-Glu
  MISC_FEATURE (25)..(25): Xaa at position 25 is alpha-methyl-Tyr
  MOD_RES (31)..(31): Lys at position 31 is chemically modified by conjugation of the epsilon-amino group of the Lys side chain with (2-[2-(2-Amino-ethoxy)-ethoxy]-acetyl)2-(gamma-Glu)-(4-(4-iodophe nyl)butanoyl)
  MOD_RES (39)..(39): Ser at position 39 is amidated

SEQ ID NO: 14 - protein, 39 aa, Artificial Sequence; identical to SEQ ID NO: 11
  Synthetic Construct
  MISC_FEATURE (2)..(2): Xaa at position 2 is Aib
  MISC_FEATURE (6)..(6): Xaa at position 6 is alpha-methyl-F(2F)
  MISC_FEATURE (10)..(10): Xaa at position 10 is 4Pal
  MISC_FEATURE (13)..(13): Xaa at position 13 is alpha-methyl-Leu
  MISC_FEATURE (16)..(16): Xaa at position 16 is Orn
  MOD_RES (17)..(17): Lys at position 17 is chemically modified by conjugation of the epsilon-amino group of the Lys side chain with (2-[2-(2-Amino-ethoxy)-ethoxy]-acetyl)2-(gamma-Glu)-(4-(4-tert-bu tylphenyl)butanoyl)
  MISC_FEATURE (20)..(20): Xaa at position 20 is Aib
  MISC_FEATURE (24)..(24): Xaa at position 24 is D-Glu
  MISC_FEATURE (25)..(25): Xaa at position 25 is alpha-methyl-Tyr
  MOD_RES (31)..(31): Lys at position 31 is chemically modified by conjugation of the epsilon-amino group of the Lys side chain with (2-[2-(2-Amino-ethoxy)-ethoxy]-acetyl)2-(gamma-Glu)-(4-(4-tert-bu tylphenyl)butanoyl)
  MOD_RES (39)..(39): Ser at position 39 is amidated

SEQ ID NO: 15 - protein, 39 aa, Artificial Sequence; identical to SEQ ID NO: 11
  Synthetic Construct
  MISC_FEATURE (2)..(2): Xaa at position 2 is Aib
  MISC_FEATURE (6)..(6): Xaa at position 6 is alpha-methyl-F(2F)
  MISC_FEATURE (10)..(10): Xaa at position 10 is 4Pal
  MISC_FEATURE (13)..(13): Xaa at position 13 is alpha-methyl-Leu
  MISC_FEATURE (16)..(16): Xaa at position 16 is Orn
  MOD_RES (17)..(17): Lys at position 17 is chemically modified by conjugation of the epsilon-amino group of the Lys side chain with (2-[2-(2-Amino-ethoxy)-ethoxy]-acetyl)2-(gamma-Glu)-CO-(CH2)10-CH 3
  MISC_FEATURE (20)..(20): Xaa at position 20 is Aib
  MISC_FEATURE (24)..(24): Xaa at position 24 is D-Glu
  MISC_FEATURE (25)..(25): Xaa at position 25 is alpha-methyl-Tyr
  MOD_RES (31)..(31): Lys at position 31 is chemically modified by conjugation of the epsilon-amino group of the Lys side chain with (2-[2-(2-Amino-ethoxy)-ethoxy]-acetyl)2-(gamma-Glu)-CO-(CH2)10-CH 3
  MOD_RES (39)..(39): Ser at position 39 is amidated

SEQ ID NO: 16 - protein, 39 aa, Artificial Sequence; identical to SEQ ID NO: 11
  Synthetic Construct
  MISC_FEATURE (2)..(2): Xaa at position 2 is Aib
  MISC_FEATURE (6)..(6): Xaa at position 6 is alpha-methyl-Phe(2F)
  MISC_FEATURE (10)..(10): Xaa at position 10 is 4Pal
  MISC_FEATURE (13)..(13): Xaa at position 13 is alpha-methyl-Leu
  MISC_FEATURE (16)..(16): Xaa at position 16 is Orn
  MOD_RES (17)..(17): Lys at position 17 is chemically modified by conjugation of the epsilon-amino group of the Lys side chain with (2-[2-(2-amino-ethoxy)-ethoxy]-acetyl)2-(gamma-Glu)-CO-(CH2)10-CO 2H
  MISC_FEATURE (20)..(20): Xaa at position 20 is Aib
  MISC_FEATURE (24)..(24): Xaa at position 24 is D-Glu
  MISC_FEATURE (25)..(25): Xaa at position 25 is alpha-methyl-Tyr
  MOD_RES (31)..(31): Lys at position 31 is chemically modified by conjugation of the epsilon-amino group of the Lys side chain with (2-[2-(2-amino-ethoxy)-ethoxy]-acetyl)2-(gamma-Glu)-CO-(CH2)10-CO 2H
  MOD_RES (39)..(39): Ser at position 39 is amidated

SEQ ID NO: 17 - protein, 39 aa, Artificial Sequence; identical to SEQ ID NO: 11
  Synthetic Construct
  MISC_FEATURE (2)..(2): Xaa at position 2 is Aib
  MISC_FEATURE (6)..(6): Xaa at position 6 is alpha-methyl-Phe(2F)
  MISC_FEATURE (10)..(10): Xaa at position 10 is 4Pal
  MISC_FEATURE (13)..(13): Xaa at position 13 is alpha-methyl-Leu
  MISC_FEATURE (16)..(16): Xaa at position 16 is Orn
  MOD_RES (17)..(17): Lys at position 17 is chemically modified by conjugation of the epsilon-amino group of the Lys side chain with (2-[2-(2-amino-ethoxy)-ethoxy]-acetyl)2-(gamma-Glu)-CO-(CH2)14-CH 3
  MISC_FEATURE (20)..(20): Xaa at position 20 is Aib
  MISC_FEATURE (24)..(24): Xaa at position 24 is D-Glu
  MISC_FEATURE (25)..(25): Xaa at position 25 is alpha-methyl-Tyr
  MOD_RES (31)..(31): Lys at position 31 is chemically modified by conjugation of the epsilon-amino group of the Lys side chain with (2-[2-(2-amino-ethoxy)-ethoxy]-acetyl)2-(gamma-Glu)-CO-(CH2)14-CH 3
  MOD_RES (39)..(39): Ser at position 39 is amidated

SEQ ID NO: 18 - protein, 39 aa, Artificial Sequence; identical to SEQ ID NO: 11
  Synthetic Construct
  MISC_FEATURE (2)..(2): Xaa at position 2 is Aib
  MISC_FEATURE (6)..(6): Xaa at position 6 is alpha-methyl-Phe(2F)
  MISC_FEATURE (10)..(10): Xaa at position 10 is 4Pal
  MISC_FEATURE (13)..(13): Xaa at position 13 is alpha-methyl-Leu
  MISC_FEATURE (16)..(16): Xaa at position 16 is Orn
  MOD_RES (17)..(17): Lys at position 17 is chemically modified by conjugation of the epsilon-amino group of the Lys side chain with (2-[2-(2-amino-ethoxy)-ethoxy]-acetyl)2-(gamma-Glu)-CO-(CH2)12-CH 3
  MISC_FEATURE (20)..(20): Xaa at position 20 is Aib
  MISC_FEATURE (24)..(24): Xaa at position 24 is D-Glu
  MISC_FEATURE (25)..(25): Xaa at position 25 is alpha-methyl-Tyr
  MOD_RES (31)..(31): Lys at position 31 is chemically modified by conjugation of the epsilon-amino group of the Lys side chain with (2-[2-(2-amino-ethoxy)-ethoxy]-acetyl)2-(gamma-Glu)-CO-(CH2)12-CH 3
  MOD_RES (39)..(39): Ser at position 39 is amidated

SEQ ID NO: 19 - protein, 39 aa, Artificial Sequence; identical to SEQ ID NO: 11
  Synthetic Construct
  MISC_FEATURE (2)..(2): Xaa at position 2 is Aib
  MISC_FEATURE (6)..(6): Xaa at position 6 is alpha-methyl-Phe(2F)
  MISC_FEATURE (10)..(10): Xaa at position 10 is 4Pal
  MISC_FEATURE (13)..(13): Xaa at position 13 is alpha-methyl-Leu
  MISC_FEATURE (16)..(16): Xaa at position 16 is Orn
  MOD_RES (17)..(17): Lys at position 17 is chemically modified by conjugation of the epsilon-amino group of the Lys side chain with (2-[2-(2-amino-ethoxy)-ethoxy]-acetyl)2-CO-(CH2)12-CO2H
  MISC_FEATURE (20)..(20): Xaa at position 20 is Aib
  MISC_FEATURE (24)..(24): Xaa at position 24 is D-Glu
  MISC_FEATURE (25)..(25): Xaa at position 25 is alpha-methyl-Tyr
  MOD_RES (31)..(31): Lys at position 31 is chemically modified by conjugation of the epsilon-amino group of the Lys side chain with (2-[2-(2-amino-ethoxy)-ethoxy]-acetyl)2-CO-(CH2)12-CO2H
  MOD_RES (39)..(39): Ser at position 39 is amidated

SEQ ID NO: 20 - protein, 39 aa, Artificial Sequence; identical to SEQ ID NO: 11
  Synthetic Construct
  MISC_FEATURE (2)..(2): Xaa at position 2 is Aib
  MISC_FEATURE (6)..(6): Xaa at position 6 is alpha-methyl-Phe(2F)
  MISC_FEATURE (10)..(10): Xaa at position 10 is 4Pal
  MISC_FEATURE (13)..(13): Xaa at position 13 is alpha-methyl-Leu
  MISC_FEATURE (16)..(16): Xaa at position 16 is Orn
  MOD_RES (17)..(17): Lys at position 17 is chemically modified by conjugation of the epsilon-amino group of the Lys side chain with (2-[2-(2-amino-ethoxy)-ethoxy]-acetyl)2--(10-(4-carboxyphenoxy)de canoyl)
  MISC_FEATURE (20)..(20): Xaa at position 20 is Aib
  MISC_FEATURE (24)..(24): Xaa at position 24 is D-Glu
  MISC_FEATURE (25)..(25): Xaa at position 25 is alpha-methyl-Tyr
  MOD_RES (31)..(31): Lys at position 31 is chemically modified by conjugation of the epsilon-amino group of the Lys side chain with (2-[2-(2-amino-ethoxy)-ethoxy]-acetyl)2--(10-(4-carboxyphenoxy)de canoyl)
  MOD_RES (39)..(39): Ser at position 39 is amidated

SEQ ID NO: 21 - protein, 39 aa, Artificial Sequence; identical to SEQ ID NO: 11
  Synthetic Construct
  MISC_FEATURE (2)..(2): Xaa at position 2 is Aib
  MISC_FEATURE (6)..(6): Xaa at position 6 is alpha-methyl-Phe(2F)
  MISC_FEATURE (10)..(10): Xaa at position 10 is 4Pal
  MISC_FEATURE (13)..(13): Xaa at position 13 is alpha-methyl-Leu
  MISC_FEATURE (16)..(16): Xaa at position 16 is Orn
  MOD_RES (17)..(17): Lys at position 17 is chemically modified by conjugation of the epsilon-amino group of the Lys side chain with (2-[2-(2-amino-ethoxy)-ethoxy]-acetyl)-(gamma-Glu)-CO-(CH2)12-CO2 H
  MISC_FEATURE (20)..(20): Xaa at position 20 is Aib
  MISC_FEATURE (24)..(24): Xaa at position 24 is D-Glu
  MISC_FEATURE (25)..(25): Xaa at position 25 is alpha-methyl-Tyr
  MOD_RES (31)..(31): Lys at position 31 is chemically modified by conjugation of the epsilon-amino group of the Lys side chain with (2-[2-(2-amino-ethoxy)-ethoxy]-acetyl)-(gamma-Glu)-CO-(CH2)12-CO2 H
  MOD_RES (39)..(39): Ser at position 39 is amidated

SEQ ID NO: 22 - protein, 39 aa, Artificial Sequence; identical to SEQ ID NO: 11
  Synthetic Construct
  MISC_FEATURE (2)..(2): Xaa at position 2 is Aib
  MISC_FEATURE (6)..(6): Xaa at position 6 is alpha-methyl-Phe(2F)
  MISC_FEATURE (10)..(10): Xaa at position 10 is 4Pal
  MISC_FEATURE (13)..(13): Xaa at position 13 is alpha-methyl-Leu
  MISC_FEATURE (16)..(16): Xaa at position 16 is Orn
  MOD_RES (17)..(17): Lys at position 17 is chemically modified by conjugation of the epsilon-amino group of the Lys side chain with (2-[2-(2-amino-ethoxy)-ethoxy]-acetyl)-(gamma-Glu)-(10-(4-carboxy phenoxy)decanoyl)
  MISC_FEATURE (20)..(20): Xaa at position 20 is Aib
  MISC_FEATURE (24)..(24): Xaa at position 24 is D-Glu
  MISC_FEATURE (25)..(25): Xaa at position 25 is alpha-methyl-Tyr
  MOD_RES (31)..(31): Lys at position 31 is chemically modified by conjugation of the epsilon-amino group of the Lys side chain with (2-[2-(2-amino-ethoxy)-ethoxy]-acetyl)-(gamma-Glu)-(10-(4-carboxy phenoxy)decanoyl)
  MOD_RES (39)..(39): Ser at position 39 is amidated

SEQ ID NO: 23 - protein, 39 aa, Artificial Sequence; identical to SEQ ID NO: 11
  Synthetic Construct
  MISC_FEATURE (2)..(2): Xaa at position 2 is Aib
  MISC_FEATURE (6)..(6): Xaa at position 6 is alpha-methyl-Phe(2F)
  MISC_FEATURE (10)..(10): Xaa at position 10 is 4Pal
  MISC_FEATURE (13)..(13): Xaa at position 13 is alpha-methyl-Leu
  MISC_FEATURE (16)..(16): Xaa at position 16 is Orn
  MOD_RES (17)..(17): Lys at position 17 is chemically modified by conjugation of the epsilon-amino group of the Lys side chain with (2-[2-(2-amino-ethoxy)-ethoxy]-acetyl)-(gamma-Glu)-CO-(CH2)14-CH3
  MISC_FEATURE (20)..(20): Xaa at position 20 is Aib
  MISC_FEATURE (24)..(24): Xaa at position 24 is D-Glu
  MISC_FEATURE (25)..(25): Xaa at position 25 is alpha-methyl-Tyr
  MOD_RES (31)..(31): Lys at position 31 is chemically modified by conjugation of the epsilon-amino group of the Lys side chain with (2-[2-(2-amino-ethoxy)-ethoxy]-acetyl)-(gamma-Glu)-CO-(CH2)14-CH3
  MOD_RES (39)..(39): Ser at position 39 is amidated

SEQ ID NO: 24 - protein, 39 aa, Artificial Sequence; identical to SEQ ID NO: 11
  Synthetic Construct
  MISC_FEATURE (2)..(2): Xaa at position 2 is Aib
  MISC_FEATURE (6)..(6): Xaa at position 6 is alpha-methyl-Phe(2F)
  MISC_FEATURE (10)..(10): Xaa at position 10 is 4Pal
  MISC_FEATURE (13)..(13): Xaa at position 13 is alpha-methyl-Leu
  MISC_FEATURE (16)..(16): Xaa at position 16 is Orn
  MOD_RES (17)..(17): Lys at position 17 is chemically modified by conjugation of the epsilon-amino group of the Lys side chain with (2-[2-(2-amino-ethoxy)-ethoxy]-acetyl)-(gamma-Glu)-CO-(CH2)10-CH3
  MISC_FEATURE (20)..(20): Xaa at position 20 is Aib
  MISC_FEATURE (24)..(24): Xaa at position 24 is D-Glu
  MISC_FEATURE (25)..(25): Xaa at position 25 is alpha-methyl-Tyr
  MOD_RES (31)..(31): Lys at position 31 is chemically modified by conjugation of the epsilon-amino group of the Lys side chain with (2-[2-(2-amino-ethoxy)-ethoxy]-acetyl)-(gamma-Glu)-CO-(CH2)10-CH3
  MOD_RES (39)..(39): Ser at position 39 is amidated

SEQ ID NO: 25 - protein, 39 aa, Artificial Sequence
  Synthetic Construct
  MISC_FEATURE (2)..(2): Xaa at position 2 is Aib
  MISC_FEATURE (6)..(6): Xaa at position 6 is alpha-methyl-Phe(2F)
  MISC_FEATURE (10)..(10): Xaa at position 10 is 4Pal
  MISC_FEATURE (13)..(13): Xaa at position 13 is alpha-methyl-Leu
  MISC_FEATURE (16)..(16): Xaa at position 16 is Orn
  MOD_RES (17)..(17): Lys at position 17 is chemically modified by conjugation of the epsilon-amino group of the Lys side chain with (2-[2-(2-amino-ethoxy)-ethoxy]-acetyl)2-(gamma-Glu)-CO-(CH2)12-CO 2H
  MISC_FEATURE (20)..(20): Xaa at position 20 is Aib
  MOD_RES (21)..(21): Lys at position 21 is chemically modified by conjugation of the epsilon-amino group of the Lys side chain with (2-[2-(2-amino-ethoxy)-ethoxy]-acetyl)2-(gamma-Glu)-CO-(CH2)12-CO 2H
  MISC_FEATURE (24)..(24): Xaa at position 24 is D-Glu
  MISC_FEATURE (25)..(25): Xaa at position 25 is alpha-methyl-Tyr
  MOD_RES (39)..(39): Ser at position 39 is amidated
YXEGTXTSDXSIXLDXKAQXKFIXXLIEGGPSSGAPPPS

SEQ ID NO: 26 - protein, 39 aa, Artificial Sequence
  Synthetic Construct
  MISC_FEATURE (2)..(2): Xaa at position 2 is Aib
  MISC_FEATURE (6)..(6): Xaa at position 6 is alpha-methyl-Phe(2F)
  MISC_FEATURE (10)..(10): Xaa at position 10 is 4Pal
  MISC_FEATURE (13)..(13): Xaa at position 13 is alpha-methyl-Leu
  MISC_FEATURE (16)..(16): Xaa at position 16 is Orn
  MOD_RES (17)..(17): Lys at position 17 is chemically modified by conjugation of the epsilon-amino group of the Lys side chain with (2-[2-(2-amino-ethoxy)-ethoxy]-acetyl)2-(gamma-Glu)-CO-(CH2)12-CO 2H
  MISC_FEATURE (20)..(20): Xaa at position 20 is Aib
  MOD_RES (24)..(24): Lys at position 24 is chemically modified by conjugation of the epsilon-amino group of the Lys side chain with (2-[2-(2-amino-ethoxy)-ethoxy]-acetyl)2-(gamma-Glu)-CO-(CH2)12-CO 2H
  MISC_FEATURE (25)..(25): Xaa at position 25 is alpha-methyl-Tyr
  MOD_RES (39)..(39): Ser at position 39 is amidated
YXEGTXTSDXSIXLDXKAQXEFIKXLIEGGPSSGAPPPS

SEQ ID NO: 27 - protein, 39 aa, Artificial Sequence
  Synthetic Construct
  MISC_FEATURE (2)..(2): Xaa at position 2 is Aib
  MISC_FEATURE (6)..(6): Xaa at position 6 is alpha-methyl-Phe(2F)
  MISC_FEATURE (10)..(10): Xaa at position 10 is 4Pal
  MISC_FEATURE (13)..(13): Xaa at position 13 is alpha-methyl-Leu
  MISC_FEATURE (16)..(16): Xaa at position 16 is Orn
  MOD_RES (17)..(17): Lys at position 17 is chemically modified by conjugation of the epsilon-amino group of the Lys side chain with (2-[2-(2-amino-ethoxy)-ethoxy]-acetyl)2-(gamma-Glu)-CO-(CH2)12-CO 2H
  MISC_FEATURE (20)..(20): Xaa at position 20 is Aib
  MISC_FEATURE (24)..(20): Xaa at position 24 is D-Glu
  misc_feature (24)..(24): Xaa can be any naturally occurring amino acid
  MISC_FEATURE (25)..(25): Xaa at position 25 is alpha-methyl-Tyr
  MOD_RES (28)..(28): Lys at position 28 is chemically modified by conjugation of the epsilon-amino group of the Lys side chain with (2-[2-(2-amino-ethoxy)-ethoxy]-acetyl)2-(gamma-Glu)-CO-(CH2)12-CO 2H
  MOD_RES (39)..(39): Ser at position 39 is amidated
YXEGTXTSDXSIXLDXKAQXEFIXXLIKGGPSSGAPPPS

SEQ ID NO: 28 - protein, 39 aa, Artificial Sequence
  Synthetic Construct
  MISC_FEATURE (2)..(2): Xaa at position 2 is Aib
  MISC_FEATURE (6)..(6): Xaa at position 6 is alpha-methyl-Phe(2F)
  MISC_FEATURE (10)..(10): Xaa at position 10 is 4Pal
  MISC_FEATURE (13)..(13): Xaa at position 13 is alpha-methyl-Leu
  MISC_FEATURE (16)..(16): Xaa at position 16 is Orn
  MOD_RES (17)..(17): Lys at position 17 is chemically modified by conjugation of the epsilon-amino group of the Lys side chain with (2-[2-(2-amino-ethoxy)-ethoxy]-acetyl)2-(gamma-Glu)-CO-(CH2)12-CO 2H
  MISC_FEATURE (20)..(20): Xaa at position 20 is Aib
  MISC_FEATURE (24)..(24): Xaa at position 24 is D-Glu
  MISC_FEATURE (25)..(25): Xaa at position 25 is alpha-methyl-Tyr
  MOD_RES (30)..(30): Lys at position 30 is chemically modified by conjugation of the epsilon-amino group of the Lys side chain with (2-[2-(2-amino-ethoxy)-ethoxy]-acetyl)2-(gamma-Glu)-CO-(CH2)12-CO 2H
  MOD_RES (39)..(39): Ser at position 39 is amidated
YXEGTXTSDXSIXLDXKAQXEFIXXLIEGKPSSGAPPPS

SEQ ID NO: 29 - protein, 40 aa, Artificial Sequence
  Synthetic Construct
  MISC_FEATURE (2)..(2): Xaa at position 2 is Aib
  MISC_FEATURE (6)..(6): Xaa at position 6 is alpha-methyl-Phe(2F)
  MISC_FEATURE (10)..(10): Xaa at position 10 is 4Pal
  MISC_FEATURE (13)..(13): Xaa at position 13 is alpha-methyl-Leu
  MISC_FEATURE (16)..(16): Xaa at position 16 is Orn
  MOD_RES (17)..(17): Lys at position 17 is chemically modified by conjugation of the epsilon-amino group of the Lys side chain with (2-[2-(2-amino-ethoxy)-ethoxy]-acetyl)2-(gamma-Glu)-CO-(CH2)12-CO 2H
  MISC_FEATURE (20)..(20): Xaa at position 20 is Aib
  MISC_FEATURE (24)..(24): Xaa at position 24 is D-Glu
  MISC_FEATURE (25)..(25): Xaa at position 25 is alpha-methyl-Tyr
  MOD_RES (40)..(40): Lys at position 40 is chemically modified by conjugation of the epsilon-amino group of the Lys side chain with (2-[2-(2-amino-ethoxy)-ethoxy]-acetyl)2-(gamma-Glu)-CO-(CH2)12-CO 2H
  MOD_RES (40)..(40): Lys at position 40 is amidated
YXEGTXTSDXSIXLDXKAQXEFIXXLIEGGPSSGAPPPSK

SEQ ID NO: 30 - protein, 39 aa, Artificial Sequence
  Synthetic Construct
  MISC_FEATURE (2)..(2): Xaa at position 2 is Aib
  MISC_FEATURE (6)..(6): Xaa at position 6 is alpha-methyl-Phe(2F)
  MISC_FEATURE (10)..(10): Xaa at position 10 is 4Pal
  MISC_FEATURE (13)..(13): Xaa at position 13 is alpha-methyl-Leu
  MISC_FEATURE (16)..(16): Xaa at position 16 is Orn
  MISC_FEATURE (20)..(20): Xaa at position 20 is Aib
  MISC_FEATURE (24)..(24): Xaa at position 24 is D-Glu
  MISC_FEATURE (25)..(25): Xaa at position 25 is alpha-methyl-Tyr
  MOD_RES (28)..(28): Lys at position 28 is chemically modified by conjugation of the epsilon-amino group of the Lys side chain with (2-[2-(2-amino-ethoxy)-ethoxy]-acetyl)2-(gamma-Glu)-CO-(CH2)12-CO 2H
  MOD_RES (31)..(31): Lys at position 31 is chemically modified by conjugation of the epsilon-amino group of the Lys side chain with (2-[2-(2-amino-ethoxy)-ethoxy]-acetyl)2-(gamma-Glu)-CO-(CH2)12-CO 2H
  MOD_RES (39)..(39): Ser at position 39 is amidated
YXEGTXTSDXSIXLDXIAQXEFIXXLIKGGKSSGAPPPS

SEQ ID NO: 31 - protein, 39 aa, Artificial Sequence; identical to SEQ ID NO: 25
  Synthetic Construct
  MISC_FEATURE (2)..(2): Xaa at position 2 is Aib
  MISC_FEATURE (6)..(6): Xaa at position 6 is alpha-methyl-Phe(2F)
  MISC_FEATURE (10)..(10): Xaa at position 10 is 4Pal
  MISC_FEATURE (13)..(13): Xaa at position 13 is alpha-methyl-Leu
  MISC_FEATURE (16)..(16): Xaa at position 16 is Orn
  MOD_RES (17)..(17): Lys at position 17 is chemically modified by conjugation of the epsilon-amino group of the Lys side chain with (2-[2-(2-amino-ethoxy)-ethoxy]-acetyl)2-(gamma-Glu)-CO-(CH2)14-CH 3
  MISC_FEATURE (20)..(20): Xaa at position 20 is Aib
  MOD_RES (21)..(21): Lys at position 21 is chemically modified by conjugation of the epsilon-amino group of the Lys side chain with (2-[2-(2-amino-ethoxy)-ethoxy]-acetyl)2-(gamma-Glu)-CO-(CH2)14-CH 3
  MISC_FEATURE (24)..(24): Xaa at position 24 is D-Glu
  MISC_FEATURE (25)..(25): Xaa at position 25 is alpha-methyl-Tyr
  MOD_RES (39)..(39): Ser at position 39 is amidated

SEQ ID NO: 32 - protein, 39 aa, Artificial Sequence; identical to SEQ ID NO: 26
  Synthetic Construct
  MISC_FEATURE (2)..(2): Xaa at position 2 is Aib
  MISC_FEATURE (6)..(6): Xaa at position 6 is alpha-methyl-Phe(2F)
  MISC_FEATURE (10)..(10): Xaa at position 10 is 4Pal
  MISC_FEATURE (13)..(13): Xaa at position 13 is alpha-methyl-Leu
  MISC_FEATURE (16)..(16): Xaa at position 16 is Orn
  MOD_RES (17)..(17): Lys at position 17 is chemically modified by conjugation of the epsilon-amino group of the Lys side chain with (2-[2-(2-amino-ethoxy)-ethoxy]-acetyl)2-(gamma-Glu)-CO-(CH2)14-CH 3
  MISC_FEATURE (20)..(20): Xaa at position 20 is Aib
  MOD_RES (24)..(24): Lys at position 24 is chemically modified by conjugation of the epsilon-amino group of the Lys side chain with (2-[2-(2-amino-ethoxy)-ethoxy]-acetyl)2-(gamma-Glu)-CO-(CH2)14-CH 3
  MISC_FEATURE (25)..(25): Xaa at position 25 is alpha-methyl-Tyr
  MOD_RES (39)..(39): Ser at position 39 is amidated

SEQ ID NO: 33 - protein, 39 aa, Artificial Sequence; identical to SEQ ID NO: 27
  Synthetic Construct
  MISC_FEATURE (2)..(2): Xaa at position 2 is Aib
  MISC_FEATURE (6)..(6): Xaa at position 6 is alpha-methyl-Phe(2F)
  MISC_FEATURE (10)..(10): Xaa at position 10 is 4Pal
  MISC_FEATURE (13)..(13): Xaa at position 13 is alpha-methyl-Leu
  MISC_FEATURE (16)..(16): Xaa at position 16 is Orn
  MOD_RES (17)..(17): Lys at position 17 is chemically modified by conjugation of the epsilon-amino group of the Lys side chain with (2-[2-(2-amino-ethoxy)-ethoxy]-acetyl)2-(gamma-Glu)-CO-(CH2)14-CH 3
  MISC_FEATURE (20)..(20): Xaa at position 20 is Aib
  MISC_FEATURE (24)..(24): Xaa at position 24 is D-Glu
  MISC_FEATURE (25)..(25): Xaa at position 25 is alpha-methyl-Tyr
  MOD_RES (28)..(28): Lys at position 28 is chemically modified by conjugation of the epsilon-amino group of the Lys side chain with (2-[2-(2-amino-ethoxy)-ethoxy]-acetyl)2-(gamma-Glu)-CO-(CH2)14-CH 3
  MOD_RES (39)..(39): Ser at position 39 is amidated

SEQ ID NO: 34 - protein, 39 aa, Artificial Sequence; identical to SEQ ID NO: 28
  Synthetic Construct
  MISC_FEATURE (2)..(2): Xaa at position 2 is Aib
  MISC_FEATURE (6)..(6): Xaa at position 6 is alpha-methyl-Phe(2F)
  MISC_FEATURE (10)..(10): Xaa at position 10 is 4Pal
  MISC_FEATURE (13)..(13): Xaa at position 13 is alpha-methyl-Leu
  MISC_FEATURE (16)..(16): Xaa at position 16 is Orn
  MOD_RES (17)..(17): Lys at position 17 is chemically modified by conjugation of the epsilon-amino group of the Lys side chain with (2-[2-(2-amino-ethoxy)-ethoxy]-acetyl)2-(gamma-Glu)-CO-(CH2)14-CH 3
  MISC_FEATURE (20)..(20): Xaa at position 20 is Aib
  MISC_FEATURE (24)..(24): Xaa at position 24 is D-Glu
  MISC_FEATURE (25)..(25): Xaa at position 25 is alpha-methyl-Tyr
  MOD_RES (30)..(30): Lys at position 30 is chemically modified by conjugation of the epsilon-amino group of the Lys side chain with (2-[2-(2-amino-ethoxy)-ethoxy]-acetyl)2-(gamma-Glu)-CO-(CH2)14-CH 3
  MOD_RES (39)..(39): Ser at position 39 is amidated

SEQ ID NO: 35 - protein, 40 aa, Artificial Sequence; identical to SEQ ID NO: 29
  Synthetic Construct
  MISC_FEATURE (2)..(2): Xaa at position 2 is Aib
  MISC_FEATURE (6)..(6): Xaa at position 6 is alpha-methyl-Phe(2F)
  MISC_FEATURE (10)..(10): Xaa at position 10 is 4Pal
  MISC_FEATURE (13)..(13): Xaa at position 13 is alpha-methyl-Leu
  MISC_FEATURE (16)..(16): Xaa at position 16 is Orn
  MOD_RES (17)..(17): Lys at position 17 is chemically modified by conjugation of the epsilon-amino group of the Lys side chain with (2-[2-(2-amino-ethoxy)-ethoxy]-acetyl)2-(gamma-Glu)-CO-(CH2)14-CH 3
  MISC_FEATURE (20)..(20): Xaa at position 20 is Aib
  MISC_FEATURE (24)..(24): Xaa at position 24 is D-Glu
  MISC_FEATURE (25)..(25): Xaa at position 25 is alpha-methyl-Tyr
  MOD_RES (40)..(40): Lys at position 40 is chemically modified by conjugation of the epsilon-amino group of the Lys side chain with (2-[2-(2-amino-ethoxy)-ethoxy]-acetyl)2-(gamma-Glu)-CO-(CH2)14-CH 3
  MOD_RES (40)..(40): Lys at position 40 is amidated

SEQ ID NO: 36 - protein, 39 aa, Artificial Sequence; identical to SEQ ID NO: 30
  Synthetic Construct
  MISC_FEATURE (2)..(2): Xaa at position 2 is Aib
  MISC_FEATURE (6)..(6): Xaa at position 6 is alpha-methyl-Phe(2F)
  MISC_FEATURE (10)..(10): Xaa at position 10 is 4Pal
  MISC_FEATURE (13)..(13): Xaa at position 13 is alpha-methyl-Leu
  MISC_FEATURE (16)..(16): Xaa at position 16 is Orn
  MISC_FEATURE (20)..(20): Xaa at position 20 is Aib
  MISC_FEATURE (24)..(24): Xaa at position 24 is D-Glu
  MISC_FEATURE (25)..(25): Xaa at position 25 is alpha-methyl-Tyr
  MOD_RES (28)..(28): Lys at position 28 is chemically modified by conjugation of the epsilon-amino group of the Lys side chain with (2-[2-(2-amino-ethoxy)-ethoxy]-acetyl)2-(gamma-Glu)-CO-(CH2)14-CH 3
  MOD_RES (30)..(30): Lys at position 30 is chemically modified by conjugation of the epsilon-amino group of the Lys side chain with (2-[2-(2-amino-ethoxy)-ethoxy]-acetyl)2-(gamma-Glu)-CO-(CH2)14-CH 3
  MOD_RES (39)..(39): Ser at position 39 is amidated

SEQ ID NO: 37 - protein, 39 aa, Artificial Sequence
  Synthetic Construct
  MISC_FEATURE (2)..(2): Xaa at position 2 is Aib
  MISC_FEATURE (6)..(6): Xaa at position 6 is alpha-methyl-Phe(2F)
  MOD_RES (10)..(10): Lys at position 10 is chemically modified by conjugation of the epsilon-amino group of the Lys side chain with (2-[2-(2-amino-ethoxy)-ethoxy]-acetyl)2-(gamma-Glu)-CO-(CH2)12-CO 2H
  MISC_FEATURE (13)..(13): Xaa at position 13 is alpha-methyl-Leu
  MISC_FEATURE (16)..(16): Xaa at position 16 is Orn
  MOD_RES (17)..(17): Lys at position 17 is chemically modified by conjugation of the epsilon-amino group of the Lys side chain with (2-[2-(2-amino-ethoxy)-ethoxy]-acetyl)2-(gamma-Glu)-CO-(CH2)12-CO 2H
  MISC_FEATURE (20)..(20): Xaa at position 20 is Aib
  MISC_FEATURE (24)..(24): Xaa at position 24 is D-Glu
  MISC_FEATURE (25)..(25): Xaa at position 25 is alpha-methyl-Tyr
  MOD_RES (39)..(39): Ser at position 39 is amidated
YXEGTXTSDKSIXLDXKAQXEFIXXLIEGGPSSGAPPPS

SEQ ID NO: 38 - protein, 39 aa, Artificial Sequence
  Synthetic Construct
  MISC_FEATURE (2)..(2): Xaa at position 2 is Aib
  MISC_FEATURE (6)..(6): Xaa at position 6 is alpha-methyl-Phe(2F)
  MISC_FEATURE (10)..(10): Xaa at position 10 is 4Pal
  MOD_RES (12)..(12): Lys at position 12 is chemically modified by conjugation of the epsilon-amino group of the Lys side chain with (2-[2-(2-amino-ethoxy)-ethoxy]-acetyl)2-(gamma-Glu)-CO-(CH2)12-CO 2H
  MISC_FEATURE (13)..(13): Xaa at position 13 is alpha-methyl-Leu
  MISC_FEATURE (16)..(16): Xaa at position 16 is Orn
  MOD_RES (17)..(17): Lys at position 17 is chemically modified by conjugation of the epsilon-amino group of the Lys side chain with (2-[2-(2-amino-ethoxy)-ethoxy]-acetyl)2-(gamma-Glu)-CO-(CH2)12-CO 2H
  MISC_FEATURE (20)..(20): Xaa at position 20 is Aib
  MISC_FEATURE (24)..(24): Xaa at position 24 is D-Glu
  MISC_FEATURE (25)..(25): Xaa at position 25 is alpha-methyl-Tyr
  MOD_RES (39)..(39): Ser at position 39 is amidated
YXEGTXTSDXSKXLDXKAQXEFIXXLIEGGPSSGAPPPS

SEQ ID NO: 39 - protein, 39 aa, Artificial Sequence; identical to SEQ ID NO: 37
  Synthetic Construct
  MISC_FEATURE (2)..(2): Xaa at position 2 is Aib
  MISC_FEATURE (6)..(6): Xaa at position 6 is alpha-methyl-Phe(2F)
  MOD_RES (10)..(10): Lys at position 10 is chemically modified by conjugation of the epsilon-amino group of the Lys side chain with (2-[2-(2-amino-ethoxy)-ethoxy]-acetyl)2-(gamma-Glu)-CO-(CH2)14-CH 3
  MISC_FEATURE (13)..(13): Xaa at position 13 is alpha-methyl-Leu
  MISC_FEATURE (16)..(16): Xaa at position 16 is Orn
  MOD_RES (17)..(17): Lys at position 17 is chemically modified by conjugation of the epsilon-amino group of the Lys side chain with (2-[2-(2-amino-ethoxy)-ethoxy]-acetyl)2-(gamma-Glu)-CO-(CH2)14-CH 3
  MISC_FEATURE (20)..(20): Xaa at position 20 is Aib
  MISC_FEATURE (24)..(24): Xaa at position 24 is D-Glu
  MISC_FEATURE (25)..(25): Xaa at position 25 is alpha-methyl-Tyr
  MOD_RES (39)..(39): Ser at position 39 is amidated

SEQ ID NO: 40 - protein, 39 aa, Artificial Sequence; identical to SEQ ID NO: 11
  Synthetic Construct
  MISC_FEATURE (2)..(2): Xaa at position 2 is Aib
  MISC_FEATURE (6)..(6): Xaa at position 6 is alpha-methyl-Phe(2F)
  MISC_FEATURE (10)..(10): Xaa at position 10 is 4Pal
  MISC_FEATURE (13)..(13): Xaa at position 13 is alpha-methyl-Leu
  MISC_FEATURE (16)..(16): Xaa at position 16 is Orn
  MOD_RES (17)..(17): Lys at position 17 is chemically modified by conjugation of the epsilon-amino group of the Lys side chain with (2-[2-(2-amino-ethoxy)-ethoxy]-acetyl)3-(gamma-Glu)-CO-(CH2)12-CO 2H
  MISC_FEATURE (20)..(20): Xaa at position 20 is Aib
  MISC_FEATURE (24)..(24): Xaa at position 24 is D-Glu
  MISC_FEATURE (25)..(25): Xaa at position 25 is alpha-methyl-Tyr
  MOD_RES (31)..(31): Lys at position 31 is chemically modified by conjugation of the epsilon-amino group of the Lys side chain with (2-[2-(2-amino-ethoxy)-ethoxy]-acetyl)3-(gamma-Glu)-CO-(CH2)12-CO 2H
  MOD_RES (39)..(39): Ser at position 39 is amidated

SEQ ID NO: 41 - protein, 39 aa, Artificial Sequence; identical to SEQ ID NO: 11
  Synthetic Construct
  MISC_FEATURE (2)..(2): Xaa at position 2 is Aib
  MISC_FEATURE (6)..(6): Xaa at position 6 is alpha-methyl-Phe(2F)
  MISC_FEATURE (10)..(10): Xaa at position 10 is 4Pal
  MISC_FEATURE (13)..(13): Xaa at position 13 is alpha-methyl-Leu
  MISC_FEATURE (16)..(16): Xaa at position 16 is Orn
  MOD_RES (17)..(17): Lys at position 17 is chemically modified by conjugation of the epsilon-amino group of the Lys side chain with (2-[2-(2-amino-ethoxy)-ethoxy]-acetyl)3-(gamma-Glu)-CO-(CH2)14-CH 3
  MISC_FEATURE (20)..(20): Xaa at position 20 is Aib
  MISC_FEATURE (24)..(24): Xaa at position 24 is D-Glu
  MISC_FEATURE (25)..(25): Xaa at position 25 is alpha-methyl-Tyr
  MOD_RES (31)..(31): Lys at position 31 is chemically modified by conjugation of the epsilon-amino group of the Lys side chain with (2-[2-(2-amino-ethoxy)-ethoxy]-acetyl)3-(gamma-Glu)-CO-(CH2)14-CH 3
  MOD_RES (39)..(39): Ser at position 39 is amidated

SEQ ID NO: 42 - protein, 39 aa, Artificial Sequence
  Synthetic Construct
  MISC_FEATURE (2)..(2): Xaa at position 2 is Aib
  MISC_FEATURE (6)..(6): Xaa at position 6 is alpha-methyl-Phe(2F)
  MISC_FEATURE (10)..(10): Xaa at position 10 is 4Pal
  MISC_FEATURE (13)..(13): Xaa at position 13 is alpha-methyl-Leu
  MISC_FEATURE (16)..(16): Xaa at position 16 is Orn
  MOD_RES (17)..(17): Lys at position 17 is chemically modified by conjugation of the epsilon-amino group of the Lys side chain with (2-[2-(2-amino-ethoxy)-ethoxy]-acetyl)2-(gamma-Glu)-CO-(CH2)14-CH 3
  MISC_FEATURE (20)..(20): Xaa at position 20 is Aib
  MISC_FEATURE (24)..(24): Xaa at position 24 is D-Glu
  MOD_RES (25)..(25): Lys at position 25 is chemically modified by conjugation of the epsilon-amino group of the Lys side chain with (2-[2-(2-amino-ethoxy)-ethoxy]-acetyl)2-(gamma-Glu)-CO-(CH2)14-CH 3
  MOD_RES (39)..(39): Ser at position 39 is amidated
YXEGTXTSDXSIXLDXKAQXEFIXKLIEGGPSSGAPPPS

SEQ ID NO: 43 - protein, 39 aa, Artificial Sequence; identical to SEQ ID NO: 11
  Synthetic Construct
  MISC_FEATURE (2)..(2): Xaa at position 2 is Aib
  MISC_FEATURE (6)..(6): Xaa at position 6 is alpha-methyl-Phe(2F)
  MISC_FEATURE (10)..(10): Xaa at position 10 is 4Pal
  MISC_FEATURE (13)..(13): Xaa at position 13 is alpha-methyl-Leu
  MISC_FEATURE (16)..(16): Xaa at position 16 is Orn
  MOD_RES (17)..(17): Lys at position 17 is chemically modified by conjugation of the epsilon-amino group of the Lys side chain with (2-[2-(2-amino-ethoxy)-ethoxy]-acetyl)2-(epsilon-Lys-)-CO-(CH2)12 -CO2H
  MISC_FEATURE (20)..(20): Xaa at position 20 is Aib
  MISC_FEATURE (24)..(24): Xaa at position 24 is D-Glu
  MISC_FEATURE (25)..(25): Xaa at position 25 is alpha-methyl-Tyr
  MOD_RES (31)..(31): Lys at position 31 is chemically modified by conjugation of the epsilon-amino group of the Lys side chain with (2-[2-(2-amino-ethoxy)-ethoxy]-acetyl)2-(epsilon-Lys-)-CO-(CH2)12 -CO2H
  MOD_RES (39)..(39): Ser at position 39 is amidated

SEQ ID NO: 44 - protein, 39 aa, Artificial Sequence; identical to SEQ ID NO: 11
  Synthetic Construct
  MISC_FEATURE (2)..(2): Xaa at position 2 is Aib
  MISC_FEATURE (6)..(6): Xaa at position 6 is alpha-methyl-Phe(2F)
  MISC_FEATURE (10)..(10): Xaa at position 10 is 4Pal
  MISC_FEATURE (13)..(13): Xaa at position 13 is alpha-methyl-Leu
  MISC_FEATURE (16)..(16): Xaa at position 16 is Orn
  MOD_RES (17)..(17): Lys at position 17 is chemically modified by conjugation of the epsilon-amino group of the Lys side chain with (2-[2-(2-amino-ethoxy)-ethoxy]-acetyl)2-(epsilon-Lys)-(gamma-Glu) -CO-(CH2)12-CO2H
  MISC_FEATURE (20)..(20): Xaa at position 20 is Aib
  MISC_FEATURE (24)..(25): Xaa at position 24 is D-Glu
  MISC_FEATURE (25)..(25): Xaa at position 25 is alpha-methyl-Tyr
  MOD_RES (31)..(31): Lys at position 31 is chemically modified by conjugation of the epsilon-amino group of the Lys side chain with (2-[2-(2-amino-ethoxy)-ethoxy]-acetyl)2-(epsilon-Lys)-(gamma-Glu) -CO-(CH2)12-CO2H
  MOD_RES (39)..(39): Ser at position 39 is amidated

SEQ ID NO: 45 - protein, 39 aa, Artificial Sequence; identical to SEQ ID NO: 11
  Synthetic Construct
  MISC_FEATURE (2)..(2): Xaa at position 2 is Aib
  MISC_FEATURE (6)..(6): Xaa at position 6 is alpha-methyl-Phe(2F)
  MISC_FEATURE (10)..(10): Xaa at position 10 is 4Pal
  MISC_FEATURE (13)..(13): Xaa at position 13 is alpha-methyl-Leu
  MISC_FEATURE (16)..(16): Xaa at position 16 is Orn
  MOD_RES (17)..(17): Lys at position 17 is chemically modified by conjugation of the epsilon-amino group of the Lys side chain with (2-[2-(2-amino-ethoxy)-ethoxy]-acetyl)-(epsilon-Lys)-(gamma-Glu)- CO-(CH2)12-CO2H
  MISC_FEATURE (20)..(20): Xaa at position 20 is Aib
  MISC_FEATURE (24)..(24): Xaa at position 24 is D-Glu
  MISC_FEATURE (25)..(25): Xaa at position 25 is alpha-methyl-Tyr
  MOD_RES (31)..(31): Lys at position 31 is chemically modified by conjugation of the epsilon-amino group of the Lys side chain with (2-[2-(2-amino-ethoxy)-ethoxy]-acetyl)-(epsilon-Lys)-(gamma-Glu)- CO-(CH2)12-CO2H

SEQ ID NO: 46 - protein, 39 aa, Artificial Sequence; identical to SEQ ID NO: 11
  Synthetic Construct
  MISC_FEATURE (2)..(2): Xaa at position 2 is Aib
  MISC_FEATURE (6)..(6): Xaa at position 6 is alpha-methyl-Phe(2F)
  MISC_FEATURE (10)..(10): Xaa at position 10 is 4Pal
  MISC_FEATURE (13)..(13): Xaa at position 13 is alpha-methyl-Leu
  MISC_FEATURE (16)..(16): Xaa at position 16 is Orn
  MOD_RES (17)..(17): Lys at position 17 is chemically modified by conjugation of the epsilon-amino group of the Lys side chain with (epsilon-Lys)-(2-[2-(2-amino-ethoxy)-ethoxy]-acetyl)-(gamma-Glu)- CO-(CH2)12-CO2H
  MISC_FEATURE (20)..(20): Xaa at position 20 is Aib
  MISC_FEATURE (24)..(24): Xaa at position 24 is D-Glu
  MISC_FEATURE (25)..(25): Xaa at position 25 is alpha-methyl-Tyr
  MOD_RES (31)..(31): Lys at position 31 is chemically modified by conjugation of the epsilon-amino group of the Lys side chain with (epsilon-Lys)-(2-[2-(2-amino-ethoxy)-ethoxy]-acetyl)-(gamma-Glu)- CO-(CH2)12-CO2H
  MOD_RES (39)..(39): Ser at position 39 is amidated

SEQ ID NO: 47 - protein, 39 aa, Artificial Sequence; identical to SEQ ID NO: 11
  Synthetic Construct
  MISC_FEATURE (2)..(2): Xaa at position 2 is Aib
  MISC_FEATURE (6)..(6): Xaa at position 6 is alpha-methyl-Phe(2F)
  MISC_FEATURE (10)..(10): Xaa at position 10 is 4Pal
  MISC_FEATURE (13)..(13): Xaa at position 13 is alpha-methyl-Leu
  MISC_FEATURE (16)..(16): Xaa at position 16 is Orn
  MOD_RES (17)..(17): Lys at position 17 is chemically modified by conjugation of the epsilon-amino group of the Lys side chain with (epsilon-Lys)-(2-[2-(2-amino-ethoxy)-ethoxy]-acetyl)2-(gamma-Glu) -CO-(CH2)12-CO2H
  MISC_FEATURE (20)..(20): Xaa at position 20 is Aib
  MISC_FEATURE (24)..(24): Xaa at position 24 is D-Glu
  MISC_FEATURE (25)..(25): Xaa at position 25 is alpha-methyl-Tyr
  MOD_RES (31)..(31): Lys at position 31 is chemically modified by conjugation of the epsilon-amino group of the Lys side chain with (epsilon-Lys)-(2-[2-(2-amino-ethoxy)-ethoxy]-acetyl)2-(gamma-Glu) -CO-(CH2)12-CO2H
  MOD_RES (39)..(39): Ser at position 39 is amidated

SEQ ID NO: 48 - protein, 39 aa, Artificial Sequence; identical to SEQ ID NO: 11
  Synthetic Construct
  MISC_FEATURE (2)..(2): Xaa at position 2 is Aib
  MISC_FEATURE (6)..(6): Xaa at position 6 is alpha-methyl-Phe(2F)
  MISC_FEATURE (10)..(10): Xaa at position 10 is 4Pal
  MISC_FEATURE (13)..(13): Xaa at position 13 is alpha-methyl-Leu
  MISC_FEATURE (16)..(16): Xaa at position 16 is Orn
  MOD_RES (17)..(17): Lys at position 17 is chemically modified by conjugation of the epsilon-amino group of the Lys side chain with (epsilon-Lys)-(gamma-Glu)-CO-(CH2)12-CO2H
  MISC_FEATURE (20)..(20): Xaa at position 20 is Aib
  MISC_FEATURE (24)..(24): Xaa at position 24 is D-Glu
  MISC_FEATURE (25)..(25): Xaa at position 25 is alpha-methyl-Tyr
  MOD_RES (31)..(31): Lys at position 31 is chemically modified by conjugation of the epsilon-amino group of the Lys side chain with (epsilon-Lys)-(gamma-Glu)-CO-(CH2)12-CO2H
  MOD_RES (39)..(39): Ser at position 39 is amidated

SEQ ID NO: 49 - protein, 39 aa, Artificial Sequence; identical to SEQ ID NO: 11
  Synthetic Construct
  MISC_FEATURE (2)..(2): Xaa at position 2 is Aib
  MISC_FEATURE (6)..(6): Xaa at position 6 is alpha-methyl-Phe(2F)
  MISC_FEATURE (10)..(10): Xaa at position 10 is 4Pal
  MISC_FEATURE (13)..(13): Xaa at position 13 is alpha-methyl-Leu
  MISC_FEATURE (16)..(16): Xaa at position 16 is Orn
  MOD_RES (17)..(17): Lys at position 17 is chemically modified by conjugation of the epsilon-amino group of the Lys side chain with (epsilon-Lys)-(gamma-Glu)2-CO-(CH2)12-CO2H
  MISC_FEATURE (20)..(20): Xaa at position 20 is Aib
  MISC_FEATURE (24)..(24): Xaa at position 24 is D-Glu
  MISC_FEATURE (25)..(25): Xaa at position 25 is alpha-methyl-Tyr
  MOD_RES (31)..(31): Lys at position 31 is chemically modified by conjugation of the epsilon-amino group of the Lys side chain with (epsilon-Lys)-(gamma-Glu)2-CO-(CH2)12-CO2H
  MOD_RES (39)..(39): Ser at position 39 is amidated

SEQ ID NO: 50 - protein, 39 aa, Artificial Sequence; identical to SEQ ID NO: 11
  Synthetic Construct
  MISC_FEATURE (2)..(2): Xaa at position 2 is Aib
  MISC_FEATURE (6)..(6): Xaa at position 6 is alpha-methyl-Phe(2F)
  MISC_FEATURE (10)..(10): Xaa at position 10 is 4Pal
  MISC_FEATURE (13)..(13): Xaa at position 13 is alpha-methyl-Leu
  MISC_FEATURE (16)..(16): Xaa at position 16 is Orn
  MOD_RES (17)..(17): Lys at position 17 is chemically modified by conjugation of the epsilon-amino group of the Lys side chain with (epsilon-Lys)-(epsilon-Lys)-(gamma-Glu)-CO-(CH2)12-CO2H
  MISC_FEATURE (20)..(20): Xaa at position 20 is Aib
  MISC_FEATURE (24)..(24): Xaa at position 24 is D-Glu
  MISC_FEATURE (25)..(25): Xaa at position 25 is alpha-methyl-Tyr
  MOD_RES (31)..(31): Lys at position 31 is chemically modified by conjugation of the epsilon-amino group of the Lys side chain with (epsilon-Lys)-(epsilon-Lys)-(gamma-Glu)-CO-(CH2)12-CO2H
  MOD_RES (39)..(39): Ser at position 39 is amidated

SEQ ID NO: 51 - protein, 39 aa, Artificial Sequence; identical to SEQ ID NO: 11
  Synthetic Construct
  MISC_FEATURE (2)..(2): Xaa at position 2 is Aib
  MISC_FEATURE (6)..(6): Xaa at position 6 is alpha-methyl-Phe(2F)
  MISC_FEATURE (10)..(10): Xaa at position 10 is 4Pal
  MISC_FEATURE (13)..(13): Xaa at position 13 is alpha-methyl-Leu
  MISC_FEATURE (16)..(16): Xaa at position 16 is Orn
  MOD_RES (17)..(17): Lys at position 17 is chemically modified by conjugation of the epsilon-amino group of the Lys side chain with (gamma-Glu)-(2-[2-(2-amino-ethoxy)-ethoxy]-acetyl)2-CO-(CH2)12-CO 2H
  MISC_FEATURE (20)..(20): Xaa at position 20 is Aib
  MISC_FEATURE (24)..(24): Xaa at position 24 is D-Glu
  MISC_FEATURE (25)..(25): Xaa at position 25 is alpha-methyl-Tyr
  MOD_RES (31)..(31): Lys at position 31 is chemically modified by conjugation of the epsilon-amino group of the Lys side chain with (gamma-Glu)-(2-[2-(2-amino-ethoxy)-ethoxy]-acetyl)2-CO-(CH2)12-CO 2H
  MOD_RES (39)..(39): Ser at position 39 is amidated

SEQ ID NO: 52 - protein, 39 aa, Artificial Sequence; identical to SEQ ID NO: 11
  Synthetic Construct
  MISC_FEATURE (2)..(2): Xaa at position 2 is Aib
  MISC_FEATURE (6)..(6): Xaa at position 6 is alpha-methyl-Phe(2F)
  MISC_FEATURE (10)..(10): Xaa at position 10 is 4Pal
  MISC_FEATURE (13)..(13): Xaa at position 13 is alpha-methyl-Leu
  MISC_FEATURE (16)..(16): Xaa at position 16 is Orn
  MOD_RES (17)..(17): Lys at position 17 is chemically modified by conjugation of the epsilon-amino group of the Lys side chain with (gamma-Glu)-(2-[2-(2-amino-ethoxy)-ethoxy]-acetyl)-CO-(CH2)12-CO2 H
  MISC_FEATURE (20)..(20): Xaa at position 20 is Aib
  MISC_FEATURE (24)..(24): Xaa at position 24 is D-Glu
  MISC_FEATURE (25)..(25): Xaa at position 25 is alpha-methyl-Tyr
  MOD_RES (31)..(31): Lys at position 31 is chemically modified by conjugation of the epsilon-amino group of the Lys side chain with (gamma-Glu)-(2-[2-(2-amino-ethoxy)-ethoxy]-acetyl)-CO-(CH2)12-CO2 H
  MOD_RES (39)..(39): Ser at position 39 is amidated

SEQ ID NO: 53 - protein, 39 aa, Artificial Sequence; identical to SEQ ID NO: 11
  Synthetic Construct
  MISC_FEATURE (2)..(2): Xaa at position 2 is Aib
  MISC_FEATURE (6)..(6): Xaa at position 6 is alpha-methyl-Phe(2F)
  MISC_FEATURE (10)..(10): Xaa at position 10 is 4Pal
  MISC_FEATURE (13)..(13): Xaa at position 13 is alpha-methyl-Leu
  MISC_FEATURE (16)..(16): Xaa at position 16 is Orn
  MOD_RES (17)..(17): Lys at position 17 is chemically modified by conjugation of the epsilon-amino group of the Lys side chain with (2-[2-(2-amino-ethoxy)-ethoxy]-acetyl)-(gamma-Glu)-(2-[2-(2-amino -ethoxy)-ethoxy]-acetyl)-CO-(CH2)12-CO2H
  MISC_FEATURE (20)..(20): Xaa at position 20 is Aib
  MISC_FEATURE (24)..(24): Xaa at position 24 is D-Glu
  MISC_FEATURE (25)..(25): Xaa at position 25 is alpha-methyl-Tyr
  MOD_RES (31)..(31): Lys at position 31 is chemically modified by conjugation of the epsilon-amino group of the Lys side chain with (2-[2-(2-amino-ethoxy)-ethoxy]-acetyl)-(gamma-Glu)-(2-[2-(2-amino -ethoxy)-ethoxy]-acetyl)-CO-(CH2)12-CO2H
  MOD_RES (39)..(39): Ser at position 39 is amidated

SEQ ID NO: 54 - protein, 39 aa, Artificial Sequence; identical to SEQ ID NO: 11
  Synthetic Construct
  MISC_FEATURE (2)..(2): Xaa at position 2 is Aib
  MISC_FEATURE (6)..(6): Xaa at position 6 is alpha-methyl-Phe
  MISC_FEATURE (10)..(10): Xaa at position 10 is 4Pal
  MISC_FEATURE (13)..(13): Xaa at position 13 is alpha-methyl-Leu
  MISC_FEATURE (16)..(16): Xaa at position 16 is Orn
  MOD_RES (17)..(17): Lys at position 17 is chemically modified by conjugation of the epsilon-amino group of the Lys side chain with (2-[2-(2-amino-ethoxy)-ethoxy]-acetyl)2-(gamma-Glu)-CO-(CH2)12-CO 2H
  MISC_FEATURE (20)..(20): Xaa at position 20 is Aib
  MISC_FEATURE (24)..(24): Xaa at position 24 is D-Glu
  MISC_FEATURE (25)..(25): Xaa at position 25 is alpha-methyl-Tyr
  MOD_RES (31)..(31): Lys at position 31 is chemically modified by conjugation of the epsilon-amino group of the Lys side chain with (2-[2-(2-amino-ethoxy)-ethoxy]-acetyl)2-(gamma-Glu)-CO-(CH2)12-CO 2H
  MOD_RES (39)..(39): Ser at position 39 is amidated

SEQ ID NO: 55 - protein, 39 aa, Artificial Sequence; identical to SEQ ID NO: 11
  Synthetic Construct
  MISC_FEATURE (2)..(2): Xaa at position 2 is Aib
  MISC_FEATURE (6)..(6): Xaa at position 6 is alpha-methyl-Phe
  MISC_FEATURE (10)..(10): Xaa at position10 is alpha-methyl-Phe
  MISC_FEATURE (13)..(13): Xaa at position 13 is alpha-methyl-Leu
  MISC_FEATURE (16)..(16): Xaa at position 16 is Orn
  MOD_RES (17)..(17): Lys at position 17 is chemically modified by conjugation of the epsilon-amino group of the Lys side chain with (2-[2-(2-amino-ethoxy)-ethoxy]-acetyl)2-(gamma-Glu)-CO-(CH2)12-CO 2H
  MISC_FEATURE (20)..(20): Xaa at position 20 is Aib
  MISC_FEATURE (24)..(24): Xaa at position 24 is D-Glu
  MISC_FEATURE (25)..(25): Xaa at position 25 is alpha-methyl-Tyr
  MOD_RES (31)..(31): Lys at position 31 is chemically modified by conjugation of the epsilon-amino group of the Lys side chain with (2-[2-(2-amino-ethoxy)-ethoxy]-acetyl)2-(gamma-Glu)-CO-(CH2)12-CO 2H
  MOD_RES (39)..(39): Ser at position 39 is amidated

SEQ ID NO: 56 - protein, 39 aa, Artificial Sequence; identical to SEQ ID NO: 11
  Synthetic Construct
  MISC_FEATURE (2)..(2): Xaa at position 2 is Aib
  MISC_FEATURE (6)..(6): Xaa at position 6 is alpha-methyl-Phe
  MISC_FEATURE (10)..(10): Xaa at position 10 is 4Pal
  MISC_FEATURE (13)..(13): Xaa at position 13 is alpha-methyl-Phe
  MISC_FEATURE (16)..(16): Xaa at position 16 is Orn
  MOD_RES (17)..(17): Lys at position 17 is chemically modified by conjugation of the epsilon-amino group of the Lys side chain with (2-[2-(2-amino-ethoxy)-ethoxy]-acetyl)2-(gamma-Glu)-CO-(CH2)12-CO 2H
  MISC_FEATURE (20)..(20): Xaa at position 20 is Aib
  MISC_FEATURE (24)..(24): Xaa at position 24 is D-Glu
  MISC_FEATURE (25)..(25): Xaa at position 25 is alpha-methyl-Tyr
  MOD_RES (31)..(31): Lys at position 31 is chemically modified by conjugation of the epsilon-amino group of the Lys side chain with (2-[2-(2-amino-ethoxy)-ethoxy]-acetyl)2-(gamma-Glu)-CO-(CH2)12-CO 2H
  MOD_RES (39)..(39): Ser at position 39 is amidated

SEQ ID NO: 57 - protein, 39 aa, Artificial Sequence
  Synthetic Construct
  MISC_FEATURE (2)..(2): Xaa at position 2 is Aib
  MISC_FEATURE (6)..(6): Xaa at position 6 is alpha-methyl-Phe
  MISC_FEATURE (10)..(10): Xaa at position 10 is 4Pal
  MISC_FEATURE (13)..(13): Xaa at position 13 is alpha-methyl-Leu
  MISC_FEATURE (16)..(16): Xaa at position 16 is Orn
  MOD_RES (17)..(17): Lys at position 17 is chemically modified by conjugation of the epsilon-amino group of the Lys side chain with (2-[2-(2-amino-ethoxy)-ethoxy]-acetyl)2-(gamma-Glu)-CO-(CH2)12-CO 2H
  MISC_FEATURE (20)..(20): Xaa at position 20 is Aib
  MISC_FEATURE (22)..(22): Xaa at position 22 is alpha-methyl-Phe
  MISC_FEATURE (24)..(24): Xaa at position 24 is D-Glu
  MISC_FEATURE (25)..(25): Xaa at position 25 is alpha-methyl-Tyr
  MOD_RES (31)..(31): Lys at position 31 is chemically modified by conjugation of the epsilon-amino group of the Lys side chain with (2-[2-(2-amino-ethoxy)-ethoxy]-acetyl)2-(gamma-Glu)-CO-(CH2)12-CO 2H
  MOD_RES (39)..(39): Ser at position 39 is amidated
YXEGTXTSDXSIXLDXKAQXEXIXXLIEGGKSSGAPPPS

SEQ ID NO: 58 - protein, 39 aa, Artificial Sequence; identical to SEQ ID NO: 11
  Synthetic Construct
  MISC_FEATURE (2)..(2): Xaa at position 2 is Aib
  MISC_FEATURE (6)..(6): Xaa at position 6 is alpha-methyl-Phe
  MISC_FEATURE (10)..(10): Xaa at position 10 is 4Pal
  MISC_FEATURE (13)..(13): Xaa at position 13 is alpha-methyl-Leu
  MISC_FEATURE (16)..(16): Xaa at position 16 is Orn
  MOD_RES (17)..(17): Lys at position 17 is chemically modified by conjugation of the epsilon-amino group of the Lys side chain with (2-[2-(2-amino-ethoxy)-ethoxy]-acetyl)2-(gamma-Glu)-CO-(CH2)12-CO 2H
  MISC_FEATURE (20)..(20): Xaa at position 20 is Aib
  MISC_FEATURE (24)..(24): Xaa at position 24 is D-Glu
  MISC_FEATURE (25)..(25): Xaa at position 25 is alpha-methyl-Phe
  MOD_RES (31)..(31): Lys at position 31 is chemically modified by conjugation of the epsilon-amino group of the Lys side chain with (2-[2-(2-amino-ethoxy)-ethoxy]-acetyl)2-(gamma-Glu)-CO-(CH2)12-CO 2H
  MOD_RES (39)..(39): Ser at position 39 is amidated

SEQ ID NO: 59 - protein, 39 aa, Artificial Sequence
  Synthetic Construct
  MISC_FEATURE (2)..(2): Xaa at position 2 is Aib
  MISC_FEATURE (6)..(6): Xaa at position 6 is alpha-methyl-Phe(2F)
  MISC_FEATURE (11)..(11): Xaa at position 11 is alpha-methyl-Ser
  MISC_FEATURE (13)..(13): Xaa at position 13 is alpha-methyl-Leu
  MISC_FEATURE (16)..(16): Xaa at position 16 is Orn
  MOD_RES (17)..(17): Lys at position 17 is chemically modified by conjugation of the epsilon-amino group of the Lys side chain with (2-[2-(2-amino-ethoxy)-ethoxy]-acetyl)2-(gamma-Glu)-CO-(CH2)12-CO 2H
  MISC_FEATURE (20)..(20): Xaa at position 20 is Aib
  MISC_FEATURE (24)..(24): Xaa at position 24 is D-Glu
  MISC_FEATURE (25)..(25): Xaa at position 25 is alpha-methyl-Tyr
  MOD_RES (31)..(31): Lys at position 31 is chemically modified by conjugation of the epsilon-amino group of the Lys side chain with (2-[2-(2-amino-ethoxy)-ethoxy]-acetyl)2-(gamma-Glu)-CO-(CH2)12-CO 2H
  MOD_RES (39)..(39): Ser at position 39 is amidated
YXEGTXTSDYXIXLDXKAQXEFIXXLIEGGKSSGAPPPS

SEQ ID NO: 60 - protein, 39 aa, Artificial Sequence; identical to SEQ ID NO: 59
  Synthetic Construct
  MISC_FEATURE (2)..(2): Xaa at position 2 is Aib
  MISC_FEATURE (6)..(6): Xaa at position 6 is alpha-methyl-Phe(2F)
  MISC_FEATURE (11)..(11): Xaa at position 11 is Aib
  MISC_FEATURE (13)..(13): Xaa at position 13 is alpha-methyl-Leu
  MISC_FEATURE (16)..(16): Xaa at position 16 is Orn
  MOD_RES (17)..(17): Lys at position 17 is chemically modified by conjugation of the epsilon-amino group of the Lys side chain with (2-[2-(2-amino-ethoxy)-ethoxy]-acetyl)2-(gamma-Glu)-CO-(CH2)12-CO 2H
  MISC_FEATURE (20)..(20): Xaa at position 20 is Aib
  MISC_FEATURE (24)..(24): Xaa at position 24 is D-Glu
  MISC_FEATURE (25)..(25): Xaa at position 25 is alpha-methyl-Tyr
  MOD_RES (31)..(31): Lys at position 31 is chemically modified by conjugation of the epsilon-amino group of the Lys side chain with (2-[2-(2-amino-ethoxy)-ethoxy]-acetyl)2-(gamma-Glu)-CO-(CH2)12-CO 2H
  MOD_RES (39)..(39): Ser at position 39 is amidated

SEQ ID NO: 61 - protein, 39 aa, Artificial Sequence; identical to SEQ ID NO: 11
  Synthetic Construct
  MISC_FEATURE (2)..(2): Xaa at position 2 is Aib
  MISC_FEATURE (6)..(6): Xaa at position 6 is alpha-methyl-Phe(2F)
  MISC_FEATURE (10)..(10): Xaa at position 10 is alpha-methyl-Leu
  MISC_FEATURE (13)..(13): Xaa at position 13 is alpha-methyl-Leu
  MISC_FEATURE (16)..(16): Xaa at position 16 is Orn
  MOD_RES (17)..(17): Lys at position 17 is chemically modified by conjugation of the epsilon-amino group of the Lys side chain with (2-[2-(2-amino-ethoxy)-ethoxy]-acetyl)2-(gamma-Glu)-CO-(CH2)12-CO 2H
  MISC_FEATURE (20)..(20): Xaa at position 20 is Aib
  MISC_FEATURE (24)..(24): Xaa at position 24 is D-Glu
  MISC_FEATURE (25)..(25): Xaa at position 25 is alpha-methyl-Tyr
  MOD_RES (31)..(31): Lys at position 31 is chemically modified by conjugation of the epsilon-amino group of the Lys side chain with (2-[2-(2-amino-ethoxy)-ethoxy]-acetyl)2-(gamma-Glu)-CO-(CH2)12-CO 2H
  MOD_RES (39)..(39): Ser at position 39 is amidated

SEQ ID NO: 62 - protein, 39 aa, Artificial Sequence; identical to SEQ ID NO: 11
  Synthetic Construct
  MISC_FEATURE (2)..(2): Xaa at position 2 is Aib
  MISC_FEATURE (6)..(6): Xaa at position 6 is alpha-methyl-Phe(2F)
  MISC_FEATURE (10)..(10): Xaa at position 10 is alpha-methyl-Val
  MISC_FEATURE (13)..(13): Xaa at position 13 is alpha-methyl-Leu
  MISC_FEATURE (16)..(16): Xaa at position 16 is Orn
  MOD_RES (17)..(17): Lys at position 17 is chemically modified by conjugation of the epsilon-amino group of the Lys side chain with (2-[2-(2-amino-ethoxy)-ethoxy]-acetyl)2-(gamma-Glu)-CO-(CH2)12-CO 2H
  MISC_FEATURE (20)..(20): Xaa at position 20 is Aib
  MISC_FEATURE (24)..(24): Xaa at position 24 is D-Glu
  MISC_FEATURE (25)..(25): Xaa at position 25 is alpha-methyl-Tyr
  MOD_RES (31)..(31): Lys at position 31 is chemically modified by conjugation of the epsilon-amino group of the Lys side chain with (2-[2-(2-amino-ethoxy)-ethoxy]-acetyl)2-(gamma-Glu)-CO-(CH2)12-CO 2H
  MOD_RES (39)..(39): Ser at position 39 is amidated

SEQ ID NO: 63 - protein, 39 aa, Artificial Sequence; identical to SEQ ID NO: 11
  Synthetic Construct
  MISC_FEATURE (2)..(2): Xaa at position 2 is Aib
  MISC_FEATURE (6)..(6): Xaa at position 6 is alpha-methyl-Phe(2F)
  MISC_FEATURE (10)..(10): Xaa at position 10 is Ac5c
  MISC_FEATURE (13)..(13): Xaa at position 13 is alpha-methyl-Leu
  MISC_FEATURE (16)..(16): Xaa at position 16 is Orn
  MOD_RES (17)..(17): Lys at position 17 is chemically modified by conjugation of the epsilon-amino group of the Lys side chain with (2-[2-(2-amino-ethoxy)-ethoxy]-acetyl)2-(gamma-Glu)-CO-(CH2)12-CO 2H
  MISC_FEATURE (20)..(20): Xaa at position 20 is Aib
  MISC_FEATURE (24)..(24): Xaa at position 24 is D-Glu
  MISC_FEATURE (25)..(25): Xaa at position 25 is alpha-methyl-Tyr
  MOD_RES (31)..(31): Lys at position 31 is chemically modified by conjugation of the epsilon-amino group of the Lys side chain with (2-[2-(2-amino-ethoxy)-ethoxy]-acetyl)2-(gamma-Glu)-CO-(CH2)12-CO 2H
  MOD_RES (39)..(39): Ser at position 39 is amidated

SEQ ID NO: 64 - protein, 39 aa, Artificial Sequence; identical to SEQ ID NO: 11
  Synthetic Construct
  MISC_FEATURE (2)..(2): Xaa at position 2 is Aib
  MISC_FEATURE (6)..(6): Xaa at position 6 is alpha-methyl-Phe(2F)
  MISC_FEATURE (10)..(10): Xaa at position 10 is Ac6c
  MISC_FEATURE (13)..(13): Xaa at position 13 is alpha-methyl-Leu
  MISC_FEATURE (16)..(16): Xaa at position 16 is Orn
  MOD_RES (17)..(17): Lys at position 17 is chemically modified by conjugation of the epsilon-amino group of the Lys side chain with (2-[2-(2-amino-ethoxy)-ethoxy]-acetyl)2-(gamma-Glu)-CO-(CH2)12-CO 2H
  MISC_FEATURE (20)..(20): Xaa at position 20 is Aib
  MISC_FEATURE (24)..(24): Xaa at position 24 is D-Glu
  MISC_FEATURE (25)..(25): Xaa at position 25 is alpha-methyl-Tyr
  MOD_RES (31)..(31): Lys at position 31 is chemically modified by conjugation of the epsilon-amino group of the Lys side chain with (2-[2-(2-amino-ethoxy)-ethoxy]-acetyl)2-(gamma-Glu)-CO-(CH2)12-CO 2H
  MOD_RES (39)..(39): Ser at position 39 is amidated

SEQ ID NO: 65 - protein, 39 aa, Artificial Sequence; identical to SEQ ID NO: 11
  Synthetic Construct
  MISC_FEATURE (2)..(2): Xaa at position 2 is Aib
  MISC_FEATURE (6)..(6): Xaa at position 6 is alpha-methyl-Phe(2F)
  MISC_FEATURE (10)..(10): Xaa at position 10 is Bip
  MISC_FEATURE (13)..(13): Xaa at position 13 is alpha-methyl-Leu
  MISC_FEATURE (16)..(16): Xaa at position 16 is Orn
  MOD_RES (17)..(17): Lys at position 17 is chemically modified by conjugation of the epsilon-amino group of the Lys side chain with (2-[2-(2-amino-ethoxy)-ethoxy]-acetyl)2-(gamma-Glu)-CO-(CH2)12-CO 2H
  MISC_FEATURE (20)..(20): Xaa at position 20 is Aib
  MISC_FEATURE (24)..(24): Xaa at position 24 is D-Glu
  MISC_FEATURE (25)..(25): Xaa at position 25 is alpha-methyl-Tyr
  MOD_RES (31)..(31): Lys at position 31 is chemically modified by conjugation of the epsilon-amino group of the Lys side chain with (2-[2-(2-amino-ethoxy)-ethoxy]-acetyl)2-(gamma-Glu)-CO-(CH2)12-CO 2H
  MOD_RES (39)..(39): Ser at position 39 is amidated

SEQ ID NO: 66 - protein, 39 aa, Artificial Sequence; identical to SEQ ID NO: 11
  Synthetic Construct
  MISC_FEATURE (2)..(2): Xaa at position 2 is Aib
  MISC_FEATURE (6)..(6): Xaa at position 6 is alpha-methyl-Phe(2F)
  MISC_FEATURE (10)..(10): Xaa at position 10 is 1Nal
  MISC_FEATURE (13)..(13): Xaa at position 13 is alpha-methyl-Leu
  MISC_FEATURE (16)..(16): Xaa at position 16 is Orn
  MOD_RES (17)..(17): Lys at position 17 is chemically modified by conjugation of the epsilon-amino group of the Lys side chain with (2-[2-(2-amino-ethoxy)-ethoxy]-acetyl)2-(gamma-Glu)-CO-(CH2)12-CO 2H
  MISC_FEATURE (20)..(20): Xaa at position 20 is Aib
  MISC_FEATURE (24)..(24): Xaa at position 24 is D-Glu
  MISC_FEATURE (25)..(25): Xaa at position 25 is alpha-methyl-Tyr
  MOD_RES (31)..(31): Lys at position 31 is chemically modified by conjugation of the epsilon-amino group of the Lys side chain with (2-[2-(2-amino-ethoxy)-ethoxy]-acetyl)2-(gamma-Glu)-CO-(CH2)12-CO 2H
  MOD_RES (39)..(39): Ser at position 39 is amidated

SEQ ID NO: 67 - protein, 39 aa, Artificial Sequence; identical to SEQ ID NO: 11
  Synthetic Construct
  MISC_FEATURE (2)..(2): Xaa at position 2 is Aib
  MISC_FEATURE (6)..(6): Xaa at position 6 is alpha-methyl-Phe(2F)
  MISC_FEATURE (10)..(10): Xaa at position 10 is 2Nal
  MISC_FEATURE (13)..(13): Xaa at position 13 is alpha-methyl-Leu
  MISC_FEATURE (16)..(16): Xaa at position 16 is Orn
  MOD_RES (17)..(17): Lys at position 17 is chemically modified by conjugation of the epsilon-amino group of the Lys side chain with (2-[2-(2-amino-ethoxy)-ethoxy]-acetyl)2-(gamma-Glu)-CO-(CH2)12-CO 2H
  MISC_FEATURE (20)..(20): Xaa at position 20 is Aib
  MISC_FEATURE (24)..(24): Xaa at position 24 is D-Glu
  MISC_FEATURE (25)..(25): Xaa at position 25 is alpha-methyl-Tyr
  MOD_RES (31)..(31): Lys at position 31 is chemically modified by conjugation of the epsilon-amino group of the Lys side chain with (2-[2-(2-amino-ethoxy)-ethoxy]-acetyl)2-(gamma-Glu)-CO-(CH2)12-CO 2H
  MOD_RES (39)..(39): Ser at position 39 is amidated

SEQ ID NO: 68 - protein, 39 aa, Artificial Sequence; identical to SEQ ID NO: 11
  Synthetic Construct
  MISC_FEATURE (2)..(2): Xaa at position 2 is Aib
  MISC_FEATURE (6)..(6): Xaa at position 6 is alpha-methyl-Phe(2F)
  MISC_FEATURE (10)..(10): Xaa at position 10 is OMeY
  MISC_FEATURE (13)..(13): Xaa at position 13 is alpha-methyl-Leu
  MISC_FEATURE (16)..(16): Xaa at position 16 is Orn
  MOD_RES (17)..(17): Lys at position 17 is chemically modified by conjugation of the epsilon-amino group of the Lys side chain with (2-[2-(2-amino-ethoxy)-ethoxy]-acetyl)2-(gamma-Glu)-CO-(CH2)12-CO 2H
  MISC_FEATURE (20)..(20): Xaa at position 20 is Aib
  MISC_FEATURE (24)..(24): Xaa at position 24 is D-Glu
  MISC_FEATURE (25)..(25): Xaa at position 25 is alpha-methyl-Tyr
  MOD_RES (31)..(31): Lys at position 31 is chemically modified by conjugation of the epsilon-amino group of the Lys side chain with (2-[2-(2-amino-ethoxy)-ethoxy]-acetyl)2-(gamma-Glu)-CO-(CH2)12-CO 2H
  MOD_RES (39)..(39): Ser at position 39 is amidated

SEQ ID NO: 69 - protein, 39 aa, Artificial Sequence; identical to SEQ ID NO: 11
  Synthetic Construct
  MISC_FEATURE (2)..(2): Xaa at position 2 is Aib
  MISC_FEATURE (6)..(6): Xaa at position 6 is alpha-methyl-Phe(2F)
  MISC_FEATURE (10)..(10): Xaa at position 10 is hTyr
  MISC_FEATURE (13)..(13): Xaa at position 13 is alpha-methyl-Leu
  MISC_FEATURE (16)..(16): Xaa at position 16 is Orn
  MOD_RES (17)..(17): Lys at position 17 is chemically modified by conjugation of the epsilon-amino group of the Lys side chain with (2-[2-(2-amino-ethoxy)-ethoxy]-acetyl)2-(gamma-Glu)-CO-(CH2)12-CO 2H
  MISC_FEATURE (20)..(20): Xaa at position 20 is Aib
  MISC_FEATURE (24)..(24): Xaa at position 24 is D-Glu
  MISC_FEATURE (25)..(25): Xaa at position 25 is alpha-methyl-Tyr
  MOD_RES (31)..(31): Lys at position 31 is chemically modified by conjugation of the epsilon-amino group of the Lys side chain with (2-[2-(2-amino-ethoxy)-ethoxy]-acetyl)2-(gamma-Glu)-CO-(CH2)12-CO 2H
  MOD_RES (39)..(39): Ser at position 39 is amidated

SEQ ID NO: 70 - protein, 39 aa, Artificial Sequence; identical to SEQ ID NO: 11
  Synthetic Construct
  MISC_FEATURE (2)..(2): Xaa at position 2 is Aib
  MISC_FEATURE (6)..(6): Xaa at position 6 is alpha-methyl-Phe(2F)
  MISC_FEATURE (10)..(10): Xaa at position 10 is Nle
  MISC_FEATURE (13)..(13): Xaa at position 13 is alpha-methyl-Leu
  MISC_FEATURE (16)..(16): Xaa at position 16 is Orn
  MOD_RES (17)..(17): Lys at position 17 is chemically modified by conjugation of the epsilon-amino group of the Lys side chain with (2-[2-(2-amino-ethoxy)-ethoxy]-acetyl)2-(gamma-Glu)-CO-(CH2)12-CO 2H
  MISC_FEATURE (20)..(20): Xaa at position 20 is Aib
  MISC_FEATURE (24)..(24): Xaa at position 24 is D-Glu
  MISC_FEATURE (25)..(25): Xaa at position 25 is alpha-methyl-Tyr
  MOD_RES (31)..(31): Lys at position 31 is chemically modified by conjugation of the epsilon-amino group of the Lys side chain with (2-[2-(2-amino-ethoxy)-ethoxy]-acetyl)2-(gamma-Glu)-CO-(CH2)12-CO 2H
  MOD_RES (39)..(39): Ser at position 39 is amidated

SEQ ID NO: 71 - protein, 39 aa, Artificial Sequence; identical to SEQ ID NO: 57
  Synthetic Construct
  MISC_FEATURE (2)..(2): Xaa at position 2 is Aib
  MISC_FEATURE (6)..(6): Xaa at position 6 is alpha-methyl-Phe(2F)
  MISC_FEATURE (10)..(10): Xaa at position 10 is 4Pal
  MISC_FEATURE (13)..(13): Xaa at position 13 is alpha-methyl-Leu
  MISC_FEATURE (16)..(16): Xaa at position 16 is Orn
  MOD_RES (17)..(17): Lys at position 17 is chemically modified by conjugation of the epsilon-amino group of the Lys side chain with (2-[2-(2-amino-ethoxy)-ethoxy]-acetyl)2-(gamma-Glu)-CO-(CH2)12-CO 2H
  MISC_FEATURE (20)..(20): Xaa at position 20 is Aib
  MISC_FEATURE (22)..(22): Xaa at position 22 is 2ClPhe
  MISC_FEATURE (24)..(24): Xaa at position 24 is D-Glu
  MISC_FEATURE (25)..(25): Xaa at position 25 is alpha-methyl-Tyr
  MOD_RES (31)..(31): Lys at position 31 is chemically modified by conjugation of the epsilon-amino group of the Lys side chain with (2-[2-(2-amino-ethoxy)-ethoxy]-acetyl)2-(gamma-Glu)-CO-(CH2)12-CO 2H
  MOD_RES (39)..(39): Ser at position 39 is amidated

SEQ ID NO: 72 - protein, 39 aa, Artificial Sequence; identical to SEQ ID NO: 57
  Synthetic Construct
  MISC_FEATURE (2)..(2): Xaa at position 2 is Aib
  MISC_FEATURE (6)..(6): Xaa at position 6 is alpha-methyl-Phe(2F)
  MISC_FEATURE (10)..(10): Xaa at position 10 is 4Pal
  MISC_FEATURE (13)..(13): Xaa at position 13 is alpha-methyl-Leu
  MISC_FEATURE (16)..(16): Xaa at position 16 is Orn
  MOD_RES (17)..(17): Lys at position 17 is chemically modified by conjugation of the epsilon-amino group of the Lys side chain with (2-[2-(2-amino-ethoxy)-ethoxy]-acetyl)2-(gamma-Glu)-CO-(CH2)12-CO 2H
  MISC_FEATURE (20)..(20): Xaa at position 20 is Aib
  MISC_FEATURE (22)..(22): Xaa at position 22 is 3ClPhe
  MISC_FEATURE (24)..(24): Xaa at position 24 is D-Glu
  MISC_FEATURE (25)..(25): Xaa at position 25 is alpha-methyl-Tyr
  MOD_RES (31)..(31): Lys at position 31 is chemically modified by conjugation of the epsilon-amino group of the Lys side chain with (2-[2-(2-amino-ethoxy)-ethoxy]-acetyl)2-(gamma-Glu)-CO-(CH2)12-CO 2H
  MOD_RES (39)..(39): Ser at position 39 is amidated

SEQ ID NO: 73 - protein, 39 aa, Artificial Sequence; identical to SEQ ID NO: 57
  Synthetic Construct
  MISC_FEATURE (2)..(2): Xaa at position 2 is Aib
  MISC_FEATURE (6)..(6): Xaa at position 6 is alpha-methyl-Phe(2F)
  MISC_FEATURE (10)..(10): Xaa at position 10 is 4Pal
  MISC_FEATURE (13)..(13): Xaa at position 13 is alpha-methyl-Leu
  MISC_FEATURE (16)..(16): Xaa at position 16 is Orn
  MOD_RES (17)..(17): Lys at position 17 is chemically modified by conjugation of the epsilon-amino group of the Lys side chain with (2-[2-(2-amino-ethoxy)-ethoxy]-acetyl)2-(gamma-Glu)-CO-(CH2)12-CO 2H
  MISC_FEATURE (20)..(20): Xaa at position 20 is Aib
  MISC_FEATURE (22)..(22): Xaa at position 22 is 2FPhe
  MISC_FEATURE (24)..(24): Xaa at position 24 is D-Glu
  MISC_FEATURE (25)..(25): Xaa at position 25 is alpha-methyl-Tyr
  MOD_RES (31)..(31): Lys at position 31 is chemically modified by conjugation of the epsilon-amino group of the Lys side chain with (2-[2-(2-amino-ethoxy)-ethoxy]-acetyl)2-(gamma-Glu)-CO-(CH2)12-CO 2H
  MOD_RES (39)..(39): Ser at position 39 is amidated

SEQ ID NO: 74 - protein, 39 aa, Artificial Sequence; identical to SEQ ID NO: 57
  Synthetic Construct
  MISC_FEATURE (2)..(2): Xaa at position 2 is Aib
  MISC_FEATURE (6)..(6): Xaa at position 6 is alpha-methyl-Phe(2F)
  MISC_FEATURE (10)..(10): Xaa at position 10 is 4Pal
  MISC_FEATURE (13)..(13): Xaa at position 13 is alpha-methyl-Leu
  MISC_FEATURE (16)..(16): Xaa at position 16 is Orn
  MOD_RES (17)..(17): Lys at position 17 is chemically modified by conjugation of the epsilon-amino group of the Lys side chain with (2-[2-(2-amino-ethoxy)-ethoxy]-acetyl)2-(gamma-Glu)-CO-(CH2)12-CO 2H
  MISC_FEATURE (20)..(20): Xaa at position 20 is Aib
  MISC_FEATURE (22)..(22): Xaa at position 22 is 3FPhe
  MISC_FEATURE (24)..(24): Xaa at position 24 is D-Glu
  MISC_FEATURE (25)..(25): Xaa at position 25 is alpha-methyl-Tyr
  MOD_RES (31)..(31): Lys at position 31 is chemically modified by conjugation of the epsilon-amino group of the Lys side chain with (2-[2-(2-amino-ethoxy)-ethoxy]-acetyl)2-(gamma-Glu)-CO-(CH2)12-CO 2H
  MOD_RES (39)..(39): Ser at position 39 is amidated

SEQ ID NO: 75 - protein, 39 aa, Artificial Sequence; identical to SEQ ID NO: 57
  Synthetic Construct
  MISC_FEATURE (2)..(2): Xaa at position 2 is Aib
  MISC_FEATURE (6)..(6): Xaa at position 6 is alpha-methyl-Phe(2F)
  MISC_FEATURE (10)..(10): Xaa at position 10 is 4Pal
  MISC_FEATURE (13)..(13): Xaa at position 13 is alpha-methyl-Leu
  MISC_FEATURE (16)..(16): Xaa at position 16 is Orn
  MOD_RES (17)..(17): Lys at position 17 is chemically modified by conjugation of the epsilon-amino group of the Lys side chain with (2-[2-(2-amino-ethoxy)-ethoxy]-acetyl)2-(gamma-Glu)-CO-(CH2)12-CO 2H
  MISC_FEATURE (20)..(20): Xaa at position 20 is Aib
  MISC_FEATURE (22)..(22): Xaa at position 22 is 3,5FPhe
  MISC_FEATURE (24)..(24): Xaa at position 24 is D-Glu
  MISC_FEATURE (25)..(25): Xaa at position 25 is alpha-methyl-Tyr
  MOD_RES (31)..(31): Lys at position 31 is chemically modified by conjugation of the epsilon-amino group of the Lys side chain with (2-[2-(2-amino-ethoxy)-ethoxy]-acetyl)2-(gamma-Glu)-CO-(CH2)12-CO 2H
  MOD_RES (39)..(39): Ser at position 39 is amidated

SEQ ID NO: 76 - protein, 39 aa, Artificial Sequence; identical to SEQ ID NO: 57
  Synthetic Construct
  MISC_FEATURE (2)..(2): Xaa at position 2 is Aib
  MISC_FEATURE (6)..(6): Xaa at position 6 is alpha-methyl-Phe(2F)
  MISC_FEATURE (10)..(10): Xaa at position 10 is 4Pal
  MISC_FEATURE (13)..(13): Xaa at position 13 is alpha-methyl-Leu
  MISC_FEATURE (16)..(16): Xaa at position 16 is Orn
  MOD_RES (17)..(17): Lys at position 17 is chemically modified by conjugation of the epsilon-amino group of the Lys side chain with (2-[2-(2-amino-ethoxy)-ethoxy]-acetyl)2-(gamma-Glu)-CO-(CH2)12-CO 2H
  MISC_FEATURE (20)..(20): Xaa at position 20 is Aib
  MISC_FEATURE (22)..(22): Xaa at position 22 is 1Nal
  MISC_FEATURE (24)..(24): Xaa at position 24 is D-Glu
  MISC_FEATURE (25)..(25): Xaa at position 25 is alpha-methyl-Tyr
  MOD_RES (31)..(31): Lys at position 31 is chemically modified by conjugation of the epsilon-amino group of the Lys side chain with (2-[2-(2-amino-ethoxy)-ethoxy]-acetyl)2-(gamma-Glu)-CO-(CH2)12-CO 2H
  MOD_RES (39)..(39): Ser at position 39 is amidated

SEQ ID NO: 77 - protein, 39 aa, Artificial Sequence; identical to SEQ ID NO: 42
  Synthetic Construct
  MISC_FEATURE (2)..(2): Xaa at position 2 is Aib
  MISC_FEATURE (6)..(6): Xaa at position 6 is alpha-methyl-Phe(2F)
  MISC_FEATURE (10)..(10): Xaa at position 10 is 4Pal
  MISC_FEATURE (13)..(13): Xaa at position 13 is alpha-methyl-Leu
  MISC_FEATURE (16)..(16): Xaa at position 16 is Orn
  MOD_RES (17)..(17): Lys at position 17 is chemically modified by conjugation of the epsilon-amino group of the Lys side chain with (2-[2-(2-amino-ethoxy)-ethoxy]-acetyl)2-(gamma-Glu)-(4-(4-tert-bu tylphenyl)butanoyl)
  MISC_FEATURE (20)..(20): Xaa at position 20 is Aib
  MISC_FEATURE (24)..(24): Xaa at position 24 is D-Glu
  MOD_RES (25)..(25): Lys at position 25 is chemically modified by conjugation of the epsilon-amino group of the Lys side chain with (2-[2-(2-amino-ethoxy)-ethoxy]-acetyl)2-(gamma-Glu)-(4-(4-tert-bu tylphenyl)butanoyl)
  MOD_RES (39)..(39): Ser at position 39 is amidated

SEQ ID NO: 78 - protein, 39 aa, Artificial Sequence
  Synthetic Construct
  MISC_FEATURE (2)..(2): Xaa at position 2 is Aib
  MISC_FEATURE (6)..(6): Xaa at position 6 is alpha-methyl-Phe(2F)
  MISC_FEATURE (10)..(10): Xaa at position 10 is 4Pal
  MISC_FEATURE (13)..(13): Xaa at position 13 is alpha-methyl-Leu
  MISC_FEATURE (16)..(16): Xaa at position 16 is Orn
  MOD_RES (17)..(17): Lys at position 17 is chemically modified by conjugation of the epsilon-amino group of the Lys side chain with (2-[2-(2-amino-ethoxy)-ethoxy]-acetyl)2-(gamma-Glu)-(4-(4-tert-bu tylphenyl)butanoyl)
  MISC_FEATURE (20)..(20): Xaa at position 20 is Aib
  MOD_RES (25)..(25): Lys at position 25 is chemically modified by conjugation of the epsilon-amino group of the Lys side chain with (2-[2-(2-amino-ethoxy)-ethoxy]-acetyl)2-(gamma-Glu)-(4-(4-tert-bu tylphenyl)butanoyl)
  MOD_RES (39)..(39): Ser at position 39 is amidated
YXEGTXTSDXSIXLDXKAQXEFIEKLIEGGPSSGAPPPS

SEQ ID NO: 79 - protein, 39 aa, Artificial Sequence
  Synthetic Construct
  MISC_FEATURE (2)..(2): Xaa at position 2 is Aib
  MISC_FEATURE (6)..(6): Xaa at position 6 is alpha-methyl-Phe(2F)
  MISC_FEATURE (10)..(10): Xaa at position 10 is 4Pal
  MISC_FEATURE (13)..(13): Xaa at position 13 is alpha-methyl-Leu
  MISC_FEATURE (16)..(16): Xaa at position 16 is Orn
  MISC_FEATURE (20)..(20): Xaa at position 20 is Aib
  MOD_RES (21)..(21): Lys at position 21 is chemically modified by conjugation of the epsilon-amino group of the Lys side chain with (2-[2-(2-amino-ethoxy)-ethoxy]-acetyl)2-(gamma-Glu)-CO-(CH2)12-CO 2H
  MOD_RES (24)..(24): Lys at position 24 is chemically modified by conjugation of the epsilon-amino group of the Lys side chain with (2-[2-(2-amino-ethoxy)-ethoxy]-acetyl)2-(gamma-Glu)-CO-(CH2)12-CO 2H
  MISC_FEATURE (25)..(25): Xaa at position 25 is alpha-methyl-Tyr
  MOD_RES (39)..(39): Ser at position 39 is amidated
YXEGTXTSDXSIXLDXIAQXKFIKXLIEGGPSSGAPPPS

SEQ ID NO: 80 - protein, 39 aa, Artificial Sequence
  Synthetic Construct
  MISC_FEATURE (2)..(2): Xaa at position 2 is Aib
  MISC_FEATURE (6)..(6): Xaa at position 6 is alpha-methyl-Phe(2F)
  MISC_FEATURE (10)..(10): Xaa at position 10 is 4Pal
  MISC_FEATURE (13)..(13): Xaa at position 13 is alpha-methyl-Leu
  MISC_FEATURE (16)..(16): Xaa at position 16 is Orn
  MISC_FEATURE (20)..(20): Xaa at position 20 is Aib
  MOD_RES (24)..(24): Lys at position 24 is chemically modified by conjugation of the epsilon-amino group of the Lys side chain with (2-[2-(2-amino-ethoxy)-ethoxy]-acetyl)2-(gamma-Glu)-CO-(CH2)12-CO 2H
  MISC_FEATURE (25)..(25): Xaa at position 25 is alpha-methyl-Tyr
  MOD_RES (28)..(28): Lys at position 28 is chemically modified by conjugation of the epsilon-amino group of the Lys side chain with (2-[2-(2-amino-ethoxy)-ethoxy]-acetyl)2-(gamma-Glu)-CO-(CH2)12-CO 2H
  MOD_RES (39)..(39): Ser at position 39 is amidated
YXEGTXTSDXSIXLDXIAQXEFIKXLIKGGPSSGAPPPS

SEQ ID NO: 81 - protein, 39 aa, Artificial Sequence
  Synthetic Construct
  MISC_FEATURE (2)..(2): Xaa at position 2 is Aib
  MISC_FEATURE (6)..(6): Xaa at position 6 is alpha-methyl-Phe(2F)
  MISC_FEATURE (10)..(10): Xaa at position 10 is 4Pal
  MISC_FEATURE (13)..(13): Xaa at position 13 is alpha-methyl-Leu
  MISC_FEATURE (16)..(16): Xaa at position 16 is Orn
  MISC_FEATURE (20)..(20): Xaa at position 20 is Aib
  MOD_RES (24)..(24): Lys at position 24 is chemically modified by conjugation of the epsilon-amino group of the Lys side chain with (2-[2-(2-amino-ethoxy)-ethoxy]-acetyl)2-(gamma-Glu)-CO-(CH2)12-CO 2H
  MISC_FEATURE (25)..(25): Xaa at position 25 is alpha-methyl-Tyr
  MOD_RES (31)..(31): Lys at position 31 is chemically modified by conjugation of the epsilon-amino group of the Lys side chain with (2-[2-(2-amino-ethoxy)-ethoxy]-acetyl)2-(gamma-Glu)-CO-(CH2)12-CO 2H
  MOD_RES (39)..(39): Ser at position 39 is amidated
YXEGTXTSDXSIXLDXIAQXEFIKXLIEGGKSSGAPPPS

SEQ ID NO: 82 - protein, 40 aa, Artificial Sequence
  Synthetic Construct
  MISC_FEATURE (2)..(2): Xaa at position 2 is Aib
  MISC_FEATURE (6)..(6): Xaa at position 6 is alpha-methyl-Phe(2F)
  MISC_FEATURE (10)..(10): Xaa at position 10 is 4Pal
  MISC_FEATURE (13)..(13): Xaa at position 13 is alpha-methyl-Leu
  MISC_FEATURE (16)..(16): Xaa at position 16 is Orn
  MISC_FEATURE (20)..(20): Xaa at position 20 is Aib
  MOD_RES (24)..(24): Lys at position 24 is chemically modified by conjugation of the epsilon-amino group of the Lys side chain with (2-[2-(2-amino-ethoxy)-ethoxy]-acetyl)2-(gamma-Glu)-CO-(CH2)12-CO 2H
  MISC_FEATURE (25)..(25): Xaa at position 25 is alpha-methyl-Tyr
  MOD_RES (40)..(40): Lys at position 40 is chemically modified by conjugation of the epsilon-amino group of the Lys side chain with (2-[2-(2-amino-ethoxy)-ethoxy]-acetyl)2-(gamma-Glu)-CO-(CH2)12-CO 2H
  MOD_RES (40)..(40): Lys at position 40 is amidated
YXEGTXTSDXSIXLDXIAQXEFIKXLIEGGPSSGAPPPSK

SEQ ID NO: 83 - protein, 39 aa, Artificial Sequence
  Synthetic Construct
  MISC_FEATURE (2)..(2): Xaa at position 2 is Aib
  MISC_FEATURE (6)..(6): Xaa at position 6 is alpha-methyl-Phe(2F)
  MISC_FEATURE (10)..(10): Xaa at position 10 is 4Pal
  MISC_FEATURE (13)..(13): Xaa at position 13 is alpha-methyl-Leu
  MISC_FEATURE (16)..(16): Xaa at position 16 is Orn
  MISC_FEATURE (20)..(20): Xaa at position 20 is Aib
  MOD_RES (21)..(21): Lys at position 21 is chemically modified by conjugation of the epsilon-amino group of the Lys side chain with (2-[2-(2-amino-ethoxy)-ethoxy]-acetyl)2-(gamma-Glu)-CO-(CH2)12-CO 2H
  MISC_FEATURE (24)..(24): Xaa at position 24 is D-Glu
  MISC_FEATURE (25)..(25): Xaa at position 25 is alpha-methyl-Tyr
  MOD_RES (28)..(28): Lys at position 28 is chemically modified by conjugation of the epsilon-amino group of the Lys side chain with (2-[2-(2-amino-ethoxy)-ethoxy]-acetyl)2-(gamma-Glu)-CO-(CH2)12-CO 2H
  MOD_RES (39)..(39): Ser at position 39 is amidated
YXEGTXTSDXSIXLDXIAQXKFIXXLIKGGPSSGAPPPS

SEQ ID NO: 84 - protein, 39 aa, Artificial Sequence
  Synthetic Construct
  MISC_FEATURE (2)..(2): Xaa at position 2 is Aib
  MISC_FEATURE (6)..(6): Xaa at position 6 is alpha-methyl-Phe(2F)
  MISC_FEATURE (10)..(10): Xaa at position 10 is 4Pal
  MISC_FEATURE (13)..(13): Xaa at position 13 is alpha-methyl-Leu
  MISC_FEATURE (16)..(16): Xaa at position 16 is Orn
  MISC_FEATURE (20)..(20): Xaa at position 20 is Aib
  MOD_RES (21)..(21): Lys at position 21 is chemically modified by conjugation of the epsilon-amino group of the Lys side chain with (2-[2-(2-amino-ethoxy)-ethoxy]-acetyl)2-(gamma-Glu)-CO-(CH2)12-CO 2H
  MISC_FEATURE (24)..(24): Xaa at position 24 is D-Glu
  MISC_FEATURE (25)..(25): Xaa at position 25 is alpha-methyl-Tyr
  MOD_RES (31)..(31): Lys at position 31 is chemically modified by conjugation of the epsilon-amino group of the Lys side chain with (2-[2-(2-amino-ethoxy)-ethoxy]-acetyl)2-(gamma-Glu)-CO-(CH2)12-CO 2H
  MOD_RES (39)..(39): Ser at position 39 is amidated
YXEGTXTSDXSIXLDXIAQXKFIXXLIEGGKSSGAPPPS

SEQ ID NO: 85 - protein, 40 aa, Artificial Sequence
  Synthetic Construct
  MISC_FEATURE (2)..(2): Xaa at position 2 is Aib
  MISC_FEATURE (6)..(6): Xaa at position 6 is alpha-methyl-Phe(2F)
  MISC_FEATURE (10)..(10): Xaa at position 10 is 4Pal
  MISC_FEATURE (13)..(13): Xaa at position 13 is alpha-methyl-Leu
  MISC_FEATURE (16)..(16): Xaa at position 16 is Orn
  MISC_FEATURE (20)..(20): Xaa at position 20 is Aib
  MOD_RES (21)..(21): Lys at position 21 is chemically modified by conjugation of the epsilon-amino group of the Lys side chain with (2-[2-(2-amino-ethoxy)-ethoxy]-acetyl)2-(gamma-Glu)-CO-(CH2)12-CO 2H
  MISC_FEATURE (24)..(24): Xaa at position 24 is D-Glu
  MISC_FEATURE (25)..(25): Xaa at position 25 is alpha-methyl-Tyr
  MOD_RES (40)..(40): Lys at position 40 is chemically modified by conjugation of the epsilon-amino group of the Lys side chain with (2-[2-(2-amino-ethoxy)-ethoxy]-acetyl)2-(gamma-Glu)-CO-(CH2)12-CO 2H
  MOD_RES (40)..(40): Lys at position 40 is amidated
YXEGTXTSDXSIXLDXIAQXKFIXXLIEGGPSSGAPPPSK

SEQ ID NO: 86 - protein, 39 aa, Artificial Sequence; identical to SEQ ID NO: 25
  Synthetic Construct
  MISC_FEATURE (2)..(2): Xaa at position 2 is Aib
  MISC_FEATURE (6)..(6): Xaa at position 6 is alpha-methyl-Phe(2F)
  MISC_FEATURE (10)..(10): Xaa at position 10 is 4Pal
  MISC_FEATURE (13)..(13): Xaa at position 13 is alpha-methyl-Leu
  MISC_FEATURE (16)..(16): Xaa at position 16 is Orn
  MOD_RES (17)..(17): Lys at position 17 is chemically modified by conjugation of the epsilon-amino group of the Lys side chain with (2-[2-(2-amino-ethoxy)-ethoxy]-acetyl)-(gamma-Glu)-CO-(CH2)12-CO2 H
  MISC_FEATURE (20)..(20): Xaa at position 20 is Aib
  MOD_RES (21)..(21): Lys at position 21 is chemically modified by conjugation of the epsilon-amino group of the Lys side chain with (2-[2-(2-amino-ethoxy)-ethoxy]-acetyl)-(gamma-Glu)-CO-(CH2)12-CO2 H
  MISC_FEATURE (24)..(24): Xaa at position 24 is D-Glu
  MISC_FEATURE (25)..(25): Xaa at position 25 is alpha-methyl-Tyr
  MOD_RES (39)..(39): Ser at position 39 is amidated

SEQ ID NO: 87 - protein, 39 aa, Artificial Sequence; identical to SEQ ID NO: 25
  Synthetic Construct
  MISC_FEATURE (2)..(2): Xaa at position 2 is Aib
  MISC_FEATURE (6)..(6): Xaa at position 6 is alpha-methyl-Phe(2F)
  MISC_FEATURE (10)..(10): Xaa at position 10 is 4Pal
  MISC_FEATURE (13)..(13): Xaa at position 13 is alpha-methyl-Leu
  MISC_FEATURE (16)..(16): Xaa at position 16 is Orn
  MOD_RES (17)..(17): Lys at position 17 is chemically modified by conjugation of the epsilon-amino group of the Lys side chain with (2-[2-(2-amino-ethoxy)-ethoxy]-acetyl)3-(gamma-Glu)-CO-(CH2)12-CO 2H
  MISC_FEATURE (20)..(20): Xaa at position 20 is Aib
  MOD_RES (21)..(21): Lys at position 21 is chemically modified by conjugation of the epsilon-amino group of the Lys side chain with (2-[2-(2-amino-ethoxy)-ethoxy]-acetyl)3-(gamma-Glu)-CO-(CH2)12-CO 2H
  MISC_FEATURE (24)..(24): Xaa at position 24 is D-Glu
  MISC_FEATURE (25)..(25): Xaa at position 25 is alpha-methyl-Tyr
  MOD_RES (39)..(39): Ser at position 39 is amidated

SEQ ID NO: 88 - protein, 39 aa, Artificial Sequence; identical to SEQ ID NO: 25
  Synthetic Construct
  MISC_FEATURE (2)..(2): Xaa at position 2 is Aib
  MISC_FEATURE (6)..(6): Xaa at position 6 is alpha-methyl-Phe(2F)
  MISC_FEATURE (10)..(10): Xaa at position 10 is 4Pal
  MISC_FEATURE (13)..(13): Xaa at position 13 is alpha-methyl-Leu
  MISC_FEATURE (16)..(16): Xaa at position 16 is Orn
  MOD_RES (17)..(17): Lys at position 17 is chemically modified by conjugation of the epsilon-amino group of the Lys side chain with (2-[2-(2-amino-ethoxy)-ethoxy]-acetyl)2-CO-(CH2)12-CO2H
  MISC_FEATURE (20)..(20): Xaa at position 20 is Aib
  MOD_RES (21)..(21): Lys at position 21 is chemically modified by conjugation of the epsilon-amino group of the Lys side chain with (2-[2-(2-amino-ethoxy)-ethoxy]-acetyl)2-CO-(CH2)12-CO2H
  MISC_FEATURE (24)..(24): Xaa at position 24 is D-Glu
  MISC_FEATURE (25)..(25): Xaa at position 25 is alpha-methyl-Tyr
  MOD_RES (39)..(39): Ser at position 39 is amidated

SEQ ID NO: 89 - protein, 39 aa, Artificial Sequence; identical to SEQ ID NO: 26
  Synthetic Construct
  MISC_FEATURE (2)..(2): Xaa at position 2 is Aib
  MISC_FEATURE (6)..(6): Xaa at position 6 is alpha-methyl-Phe(2F)
  MISC_FEATURE (10)..(10): Xaa at position 10 is 4Pal
  MISC_FEATURE (13)..(13): Xaa at position 13 is alpha-methyl-Leu
  MISC_FEATURE (16)..(16): Xaa at position 16 is Orn
  MOD_RES (17)..(17): Lys at position 17 is chemically modified by conjugation of the epsilon-amino group of the Lys side chain with (2-[2-(2-amino-ethoxy)-ethoxy]-acetyl)-(gamma-Glu)-CO-(CH2)12-CO2 H
  MISC_FEATURE (20)..(20): Xaa at position 20 is Aib
  MOD_RES (24)..(24): Lys at position 24 is chemically modified by conjugation of the epsilon-amino group of the Lys side chain with (2-[2-(2-amino-ethoxy)-ethoxy]-acetyl)-(gamma-Glu)-CO-(CH2)12-CO2 H
  MISC_FEATURE (25)..(25): Xaa at position 25 is alpha-methyl-Tyr
  MOD_RES (39)..(39): Ser at position 39 is amidated

SEQ ID NO: 90 - protein, 39 aa, Artificial Sequence; identical to SEQ ID NO: 26
  Synthetic Construct
  MISC_FEATURE (2)..(2): Xaa at position 2 is Aib
  MISC_FEATURE (6)..(6): Xaa at position 6 is alpha-methyl-Phe(2F)
  MISC_FEATURE (10)..(10): Xaa at position 10 is 4Pal
  MISC_FEATURE (13)..(13): Xaa at position 13 is alpha-methyl-Leu
  MISC_FEATURE (16)..(16): Xaa at position 16 is Orn
  MOD_RES (17)..(17): Lys at position 17 is chemically modified by conjugation of the epsilon-amino group of the Lys side chain with (2-[2-(2-amino-ethoxy)-ethoxy]-acetyl)3-(gamma-Glu)-CO-(CH2)12-CO 2H
  MISC_FEATURE (20)..(20): Xaa at position 20 is Aib
  MOD_RES (24)..(24): Lys at position 24 is chemically modified by conjugation of the epsilon-amino group of the Lys side chain with (2-[2-(2-amino-ethoxy)-ethoxy]-acetyl)3-(gamma-Glu)-CO-(CH2)12-CO 2H
  MISC_FEATURE (25)..(25): Xaa at position 25 is alpha-methyl-Tyr
  MOD_RES (39)..(39): Ser at position 39 is amidated

SEQ ID NO: 91 - protein, 39 aa, Artificial Sequence; identical to SEQ ID NO: 26
  Synthetic Construct
  MISC_FEATURE (2)..(2): Xaa at position 2 is Aib
  MISC_FEATURE (6)..(6): Xaa at position 6 is alpha-methyl-Phe(2F)
  MISC_FEATURE (10)..(10): Xaa at position 10 is 4Pal
  MISC_FEATURE (13)..(13): Xaa at position 13 is alpha-methyl-Leu
  MISC_FEATURE (16)..(16): Xaa at position 16 is Orn
  MOD_RES (17)..(17): Lys at position 17 is chemically modified by conjugation of the epsilon-amino group of the Lys side chain with (2-[2-(2-amino-ethoxy)-ethoxy]-acetyl)2-CO-(CH2)12-CO2H
  MISC_FEATURE (20)..(20): Xaa at position 20 is Aib
  MOD_RES (24)..(24): Lys at position 24 is chemically modified by conjugation of the epsilon-amino group of the Lys side chain with (2-[2-(2-amino-ethoxy)-ethoxy]-acetyl)2-CO-(CH2)12-CO2H
  MISC_FEATURE (25)..(25): Xaa at position 25 is alpha-methyl-Tyr
  MOD_RES (39)..(39): Ser at position 39 is amidated

SEQ ID NO: 92 - protein, 39 aa, Artificial Sequence
  Synthetic Construct
  MISC_FEATURE (2)..(2): Xaa at position 2 is Aib
  MISC_FEATURE (6)..(6): Xaa at position 6 is alpha-methyl-Phe(2F)
  MISC_FEATURE (10)..(10): Xaa at position 10 is 4Pal
  MISC_FEATURE (13)..(13): Xaa at position 13 is alpha-methyl-Leu
  MISC_FEATURE (16)..(16): Xaa at position 16 is Orn
  MOD_RES (17)..(17): Lys at position 17 is chemically modified by conjugation of the epsilon-amino group of the Lys side chain with (2-[2-(2-amino-ethoxy)-ethoxy]-acetyl)2-(gamma-Glu)-CO-(CH2)12-CO 2H
  MISC_FEATURE (20)..(20): Xaa at position 20 is Aib
  MISC_FEATURE (22)..(22): Xaa at position 22 is alpha-methyl-Phe
  MOD_RES (24)..(24): Lys at position 24 is chemically modified by conjugation of the epsilon-amino group of the Lys side chain with (2-[2-(2-amino-ethoxy)-ethoxy]-acetyl)2-(gamma-Glu)-CO-(CH2)12-CO 2H
  MISC_FEATURE (25)..(25): Xaa at position 25 is alpha-methyl-Tyr
  MOD_RES (39)..(39): Ser at position 39 is amidated
YXEGTXTSDXSIXLDXKAQXEXIKXLIEGGPSSGAPPPS

SEQ ID NO: 93 - protein, 39 aa, Artificial Sequence; identical to SEQ ID NO: 26
  Synthetic Construct
  MISC_FEATURE (2)..(2): Xaa at position 2 is Aib
  MISC_FEATURE (6)..(6): Xaa at position 6 is alpha-methyl-Phe(2F)
  MISC_FEATURE (10)..(10): Xaa at position 10 is 4Pal
  MISC_FEATURE (13)..(13): Xaa at position 13 is alpha-methyl-Leu
  MISC_FEATURE (16)..(16): Xaa at position 16 is Orn
  MOD_RES (17)..(17): Lys at position 17 is chemically modified by conjugation of the epsilon-amino group of the Lys side chain with (2-[2-(2-amino-ethoxy)-ethoxy]-acetyl)2-(gamma-Glu)-CO-(CH2)12-CO 2H
  MISC_FEATURE (20)..(20): Xaa at position 20 is Aib
  MOD_RES (24)..(24): Lys at position 24 is chemically modified by conjugation of the epsilon-amino group of the Lys side chain with (2-[2-(2-amino-ethoxy)-ethoxy]-acetyl)2-(gamma-Glu)-CO-(CH2)12-CO 2H
  MISC_FEATURE (25)..(25): Xaa at position 25 is alpha-methyl-Phe
  MOD_RES (39)..(39): Ser at position 39 is amidated

SEQ ID NO: 94 - protein, 39 aa, Artificial Sequence; identical to SEQ ID NO: 92
  Synthetic Construct
  MISC_FEATURE (2)..(2): Xaa at position 2 is Aib
  MISC_FEATURE (6)..(6): Xaa at position 6 is alpha-methyl-Phe(2F)
  MISC_FEATURE (10)..(10): Xaa at position 10 is 4Pal
  MISC_FEATURE (13)..(13): Xaa at position 13 is alpha-methyl-Leu
  MISC_FEATURE (16)..(16): Xaa at position 16 is Orn
  MOD_RES (17)..(17): Lys at position 17 is chemically modified by conjugation of the epsilon-amino group of the Lys side chain with (2-[2-(2-amino-ethoxy)-ethoxy]-acetyl)2-(gamma-Glu)-CO-(CH2)12-CO 2H
  MISC_FEATURE (20)..(20): Xaa at position 20 is Aib
  MISC_FEATURE (22)..(22): Xaa at position 22 is alpha-methyl-Phe
  MOD_RES (24)..(24): Lys at position 24 is chemically modified by conjugation of the epsilon-amino group of the Lys side chain with (2-[2-(2-amino-ethoxy)-ethoxy]-acetyl)2-(gamma-Glu)-CO-(CH2)12-CO 2H
  MISC_FEATURE (25)..(25): Xaa at position 25 is alpha-methyl-Phe
  MOD_RES (39)..(39): Ser at position 39 is amidated

SEQ ID NO: 95 - protein, 39 aa, Artificial Sequence
  Synthetic Construct
  MISC_FEATURE (2)..(2): Xaa at position 2 is Aib
  MISC_FEATURE (6)..(6): Xaa at position 6 is alpha-methyl-Phe(2F)
  MISC_FEATURE (10)..(10): Xaa at position 10 is 4Pal
  MISC_FEATURE (13)..(13): Xaa at position 13 is alpha-methyl-Leu
  MISC_FEATURE (16)..(16): Xaa at position 16 is Orn
  MOD_RES (17)..(17): Lys at position 17 is chemically modified by conjugation of the epsilon-amino group of the Lys side chain with (2-[2-(2-amino-ethoxy)-ethoxy]-acetyl)2-(gamma-Glu)-CO-(CH2)12-CO 2H
  MISC_FEATURE (20)..(20): Xaa at position 20 is Aib
  MISC_FEATURE (22)..(22): Xaa at position 22 is alpha-methyl-Phe
  MOD_RES (24)..(24): Lys at position 24 is chemically modified by conjugation of the epsilon-amino group of the Lys side chain with (2-[2-(2-amino-ethoxy)-ethoxy]-acetyl)2-(gamma-Glu)-CO-(CH2)12-CO 2H
  MOD_RES (39)..(39): Ser at position 39 is amidated
YXEGTXTSDXSIXLDXKAQXEXIKYLIEGGPSSGAPPPS

SEQ ID NO: 96 - protein, 39 aa, Artificial Sequence
  Synthetic Construct
  MISC_FEATURE (2)..(2): Xaa at position 2 is Aib
  MISC_FEATURE (6)..(6): Xaa at position 6 is alpha-methyl-Phe(2F)
  MISC_FEATURE (10)..(10): Xaa at position 10 is 4Pal
  MISC_FEATURE (13)..(13): Xaa at position 13 is alpha-methyl-Leu
  MISC_FEATURE (16)..(16): Xaa at position 16 is Orn
  MISC_FEATURE (20)..(20): Xaa at position 20 is Aib
  MISC_FEATURE (24)..(24): Xaa at position 24 is D-Glu
  MISC_FEATURE (25)..(25): Xaa at position 25 is alpha-methyl-Tyr
  MOD_RES (28)..(28): Lys at position 28 is chemically modified by conjugation of the epsilon-amino group of the Lys side chain with (2-[2-(2-amino-ethoxy)-ethoxy]-acetyl)2-(gamma-Glu)-CO-(CH2)12-CO 2H
  MOD_RES (31)..(31): Lys at position 31 is chemically modified by conjugation of the epsilon-amino group of the Lys side chain with (2-[2-(2-amino-ethoxy)-ethoxy]-acetyl)2-(gamma-Glu)-CO-(CH2)12-CO 2H
  MOD_RES (39)..(39): Ser at position 39 is amidated
YXEGTXTSDXSIXLDXQAQXEFIXXLIKGGKSSGAPPPS

SEQ ID NO: 97 - protein, 39 aa, Artificial Sequence; identical to SEQ ID NO: 11
  Synthetic Construct
  MISC_FEATURE (2)..(2): Xaa at position 2 is Aib
  MISC_FEATURE (6)..(6): Xaa at position 6 is alpha-methyl-Phe(2F)
  MISC_FEATURE (10)..(10): Xaa at position 10 is alpha-methyl-Phe(2F)
  MISC_FEATURE (13)..(13): Xaa at position 13 is alpha-methyl-Leu
  MISC_FEATURE (16)..(16): Xaa at position 16 is Orn
  MOD_RES (17)..(17): Lys at position 17 is chemically modified by conjugation of the epsilon-amino group of the Lys side chain with (2-[2-(2-amino-ethoxy)-ethoxy]-acetyl)2-(gamma-Glu)-CO-(CH2)12-CO 2H
  MISC_FEATURE (20)..(20): Xaa at position 20 is Aib
  MISC_FEATURE (24)..(24): Xaa at position 24 is D-Glu
  MISC_FEATURE (25)..(25): Xaa at position 25 is alpha-methyl-Tyr
  MOD_RES (31)..(31): Lys at position 31 is chemically modified by conjugation of the epsilon-amino group of the Lys side chain with (2-[2-(2-amino-ethoxy)-ethoxy]-acetyl)2-(gamma-Glu)-CO-(CH2)12-CO 2H
  MOD_RES (39)..(39): Ser at position 39 is amidated

SEQ ID NO: 98 - protein, 39 aa, Artificial Sequence; identical to SEQ ID NO: 57
  Synthetic Construct
  MISC_FEATURE (2)..(2): Xaa at position 2 is Aib
  MISC_FEATURE (6)..(6): Xaa at position 6 is alpha-methyl-Phe(2F)
  MISC_FEATURE (10)..(10): Xaa at position 10 is 4Pal
  MISC_FEATURE (13)..(13): Xaa at position 13 is alpha-methyl-Leu
  MISC_FEATURE (16)..(16): Xaa at position 16 is Orn
  MOD_RES (17)..(17): Lys at position 17 is chemically modified by conjugation of the epsilon-amino group of the Lys side chain with (2-[2-(2-amino-ethoxy)-ethoxy]-acetyl)2-(gamma-Glu)-CO-(CH2)12-CO 2H
  MISC_FEATURE (20)..(20): Xaa at position 20 is Aib
  MISC_FEATURE (22)..(22): Xaa at position 22 is alpha-methyl-Phe(2F)
  MISC_FEATURE (24)..(24): Xaa at position 24 is D-Glu
  MISC_FEATURE (25)..(25): Xaa at position 25 is alpha-methyl-Tyr
  MOD_RES (31)..(31): Lys at position 31 is chemically modified by conjugation of the epsilon-amino group of the Lys side chain with (2-[2-(2-amino-ethoxy)-ethoxy]-acetyl)2-(gamma-Glu)-CO-(CH2)12-CO 2H
  MOD_RES (39)..(39): Ser at position 39 is amidated

SEQ ID NO: 99 - protein, 39 aa, Artificial Sequence
  Synthetic Construct
  MISC_FEATURE (2)..(2): Xaa at position 2 is Aib
  MISC_FEATURE (6)..(6): Xaa at position 6 is alpha-methyl-Phe(2F)
  MISC_FEATURE (10)..(10): Xaa at position 10 is 4Pal
  MISC_FEATURE (11)..(11): Xaa at position 11 is Aib
  MISC_FEATURE (13)..(13): Xaa at position 13 is alpha-methyl-Leu
  MISC_FEATURE (16)..(16): Xaa at position 16 is Orn
  MOD_RES (17)..(17): Lys at position 17 is chemically modified by conjugation of the epsilon-amino group of the Lys side chain with (2-[2-(2-amino-ethoxy)-ethoxy]-acetyl)2-(gamma-Glu)-CO-(CH2)12-CO 2H
  MISC_FEATURE (20)..(20): Xaa at position 20 is Aib
  MISC_FEATURE (24)..(24): Xaa at position 24 is D-Glu
  MISC_FEATURE (25)..(25): Xaa at position 25 is alpha-methyl-Tyr
  MOD_RES (31)..(31): Lys at position 31 is chemically modified by conjugation of the epsilon-amino group of the Lys side chain with (2-[2-(2-amino-ethoxy)-ethoxy]-acetyl)2-(gamma-Glu)-CO-(CH2)12-CO 2H
  MOD_RES (39)..(39): Ser at position 39 is amidated
YXEGTXTSDXXIXLDXKAQXEFIXXLIEGGKSSGAPPPS

SEQ ID NO: 100 - protein, 39 aa, Artificial Sequence
  Synthetic Construct
  MISC_FEATURE (2)..(2): Xaa at position 2 is Aib
  MISC_FEATURE (6)..(6): Xaa at position 6 is alpha-methyl-Phe(2F)
  MISC_FEATURE (13)..(13): Xaa at position 13 is alpha-methyl-Leu
  MISC_FEATURE (16)..(16): Xaa at position 16 is Orn
  MOD_RES (17)..(17): Lys at position 17 is chemically modified by conjugation of the epsilon-amino group of the Lys side chain with (2-[2-(2-amino-ethoxy)-ethoxy]-acetyl)2-(gamma-Glu)-CO-(CH2)12-CO 2H
  MISC_FEATURE (20)..(20): Xaa at position 20 is Aib
  MISC_FEATURE (24)..(24): Xaa at position 24 is D-Glu
  MISC_FEATURE (25)..(25): Xaa at position 25 is alpha-methyl-Tyr
  MOD_RES (31)..(31): Lys at position 31 is chemically modified by conjugation of the epsilon-amino group of the Lys side chain with (2-[2-(2-amino-ethoxy)-ethoxy]-acetyl)2-(gamma-Glu)-CO-(CH2)12-CO 2H
  MOD_RES (39)..(39): Ser at position 39 is amidated
YXEGTXTSDVSIXLDXKAQXEFIXXLIEGGKSSGAPPPS

SEQ ID NO: 101 - protein, 39 aa, Artificial Sequence
  Synthetic Construct
  MISC_FEATURE (2)..(2): Xaa at position 2 is Aib
  MISC_FEATURE (6)..(6): Xaa at position 6 is alpha-methyl-Phe(2F)
  MISC_FEATURE (11)..(11): Xaa at position 11 is Aib
  MISC_FEATURE (13)..(13): Xaa at position 13 is alpha-methyl-Leu
  MISC_FEATURE (16)..(16): Xaa at position 16 is Orn
  MOD_RES (17)..(17): Lys at position 17 is chemically modified by conjugation of the epsilon-amino group of the Lys side chain with (2-[2-(2-amino-ethoxy)-ethoxy]-acetyl)2-(gamma-Glu)-CO-(CH2)12-CO 2H
  MISC_FEATURE (20)..(20): Xaa at position 20 is Aib
  MISC_FEATURE (24)..(24): Xaa at position 24 is D-Glu
  MISC_FEATURE (25)..(25): Xaa at position 25 is alpha-methyl-Tyr
  MOD_RES (31)..(31): Lys at position 31 is chemically modified by conjugation of the epsilon-amino group of the Lys side chain with (2-[2-(2-amino-ethoxy)-ethoxy]-acetyl)2-(gamma-Glu)-CO-(CH2)12-CO 2H
  MOD_RES (39)..(39): Ser at position 39 is amidated
YXEGTXTSDVXIXLDXKAQXEFIXXLIEGGKSSGAPPPS

SEQ ID NO: 102 - protein, 39 aa, Artificial Sequence
  Synthetic Construct
  MISC_FEATURE (2)..(2): Xaa at position 2 is Aib
  MISC_FEATURE (6)..(6): Xaa at position 6 is alpha-methyl-Phe(2F)
  MISC_FEATURE (13)..(13): Xaa at position 13 is alpha-methyl-Leu
  MISC_FEATURE (16)..(16): Xaa at position 16 is Orn
  MOD_RES (17)..(17): Lys at position 17 is chemically modified by conjugation of the epsilon-amino group of the Lys side chain with (2-[2-(2-amino-ethoxy)-ethoxy]-acetyl)2-(gamma-Glu)-CO-(CH2)12-CO 2H
  MISC_FEATURE (20)..(20): Xaa at position 20 is Aib
  MISC_FEATURE (22)..(22): Xaa at position 22 is alpha-methyl-Phe
  MISC_FEATURE (24)..(24): Xaa at position 24 is D-Glu
  MISC_FEATURE (25)..(25): Xaa at position 25 is alpha-methyl-Tyr
  MOD_RES (31)..(31): Lys at position 31 is chemically modified by conjugation of the epsilon-amino group of the Lys side chain with (2-[2-(2-amino-ethoxy)-ethoxy]-acetyl)2-(gamma-Glu)-CO-(CH2)12-CO 2H
  MOD_RES (39)..(39): Ser at position 39 is amidated
YXEGTXTSDVSIXLDXKAQXEXIXXLIEGGKSSGAPPPS

SEQ ID NO: 103 - protein, 39 aa, Artificial Sequence
  Synthetic Construct
  MISC_FEATURE (2)..(2): Xaa at position 2 is Aib
  MISC_FEATURE (6)..(6): Xaa at position 6 is alpha-methyl-Phe(2F)
  MISC_FEATURE (11)..(11): Xaa at position 11 is Aib
  MISC_FEATURE (13)..(13): Xaa at position 13 is alpha-methyl-Leu
  MISC_FEATURE (16)..(16): Xaa at position 16 is Orn
  MOD_RES (17)..(17): Lys at position 17 is chemically modified by conjugation of the epsilon-amino group of the Lys side chain with (2-[2-(2-amino-ethoxy)-ethoxy]-acetyl)2-(gamma-Glu)-CO-(CH2)12-CO 2H
  MISC_FEATURE (20)..(20): Xaa at position 20 is Aib
  MISC_FEATURE (22)..(22): Xaa at position 22 is alpha-methyl-Phe
  MISC_FEATURE (24)..(24): Xaa at position 24 is D-Glu
  MISC_FEATURE (25)..(25): Xaa at position 25 is alpha-methyl-Tyr
  MOD_RES (31)..(31): Lys at position 31 is chemically modified by conjugation of the epsilon-amino group of the Lys side chain with (2-[2-(2-amino-ethoxy)-ethoxy]-acetyl)2-(gamma-Glu)-CO-(CH2)12-CO 2H
  MOD_RES (39)..(39): Ser at position 39 is amidated
YXEGTXTSDVXIXLDXKAQXEXIXXLIEGGKSSGAPPPS

SEQ ID NO: 104 - protein, 39 aa, Artificial Sequence; identical to SEQ ID NO: 57
  Synthetic Construct
  MISC_FEATURE (2)..(2): Xaa at position 2 is Aib
  MISC_FEATURE (6)..(6): Xaa at position 6 is alpha-methyl-Phe(2F)
  MISC_FEATURE (10)..(10): Xaa at position 10 is Ac5c
  MISC_FEATURE (13)..(13): Xaa at position 13 is alpha-methyl-Leu
  MISC_FEATURE (16)..(16): Xaa at position 16 is Orn
  MOD_RES (17)..(17): Lys at position 17 is chemically modified by conjugation of the epsilon-amino group of the Lys side chain with (2-[2-(2-amino-ethoxy)-ethoxy]-acetyl)2-(gamma-Glu)-CO-(CH2)12-CO 2H
  MISC_FEATURE (20)..(20): Xaa at position 20 is Aib
  MISC_FEATURE (22)..(22): Xaa at position 22 is alpha-methyl-Phe
  MISC_FEATURE (24)..(24): Xaa at position 24 is D-Glu
  MISC_FEATURE (25)..(25): Xaa at position 25 is alpha-methyl-Tyr
  MOD_RES (31)..(31): Lys at position 31 is chemically modified by conjugation of the epsilon-amino group of the Lys side chain with (2-[2-(2-amino-ethoxy)-ethoxy]-acetyl)2-(gamma-Glu)-CO-(CH2)12-CO 2H
  MOD_RES (39)..(39): Ser at position 39 is amidated

SEQ ID NO: 105 - protein, 39 aa, Artificial Sequence; identical to SEQ ID NO: 11
  Synthetic Construct
  MISC_FEATURE (2)..(2): Xaa at position 2 is Aib
  MISC_FEATURE (6)..(6): Xaa at position 6 is alpha-methyl-Phe(2F)
  MISC_FEATURE (10)..(10): Xaa at position 10 is Ac4c
  MISC_FEATURE (13)..(13): Xaa at position 13 is alpha-methyl-Leu
  MISC_FEATURE (16)..(16): Xaa at position 16 is Orn
  MOD_RES (17)..(17): Lys at position 17 is chemically modified by conjugation of the epsilon-amino group of the Lys side chain with (2-[2-(2-amino-ethoxy)-ethoxy]-acetyl)2-(gamma-Glu)-CO-(CH2)12-CO 2H
  MISC_FEATURE (20)..(20): Xaa at position 20 is Aib
  MISC_FEATURE (24)..(24): Xaa at position 24 is D-Glu
  MISC_FEATURE (25)..(25): Xaa at position 25 is alpha-methyl-Tyr
  MOD_RES (31)..(31): Lys at position 31 is chemically modified by conjugation of the epsilon-amino group of the Lys side chain with (2-[2-(2-amino-ethoxy)-ethoxy]-acetyl)2-(gamma-Glu)-CO-(CH2)12-CO 2H
  MOD_RES (39)..(39): Ser at position 39 is amidated

SEQ ID NO: 106 - protein, 39 aa, Artificial Sequence; identical to SEQ ID NO: 11
  Synthetic Construct
  MISC_FEATURE (2)..(2): Xaa at position 2 is Aib
  MISC_FEATURE (6)..(6): Xaa at position 6 is alpha-methyl-Phe(2F)
  MISC_FEATURE (10)..(10): Xaa at position 10 is 4CPhe
  MISC_FEATURE (13)..(13): Xaa at position 13 is alpha-methyl-Leu
  MISC_FEATURE (16)..(16): Xaa at position 16 is Orn
  MOD_RES (17)..(17): Lys at position 17 is chemically modified by conjugation of the epsilon-amino group of the Lys side chain with (2-[2-(2-amino-ethoxy)-ethoxy]-acetyl)2-(gamma-Glu)-CO-(CH2)12-CO 2H
  MISC_FEATURE (20)..(20): Xaa at position 20 is Aib
  MISC_FEATURE (24)..(24): Xaa at position 24 is D-Glu
  MISC_FEATURE (25)..(25): Xaa at position 25 is alpha-methyl-Tyr
  MOD_RES (31)..(31): Lys at position 31 is chemically modified by conjugation of the epsilon-amino group of the Lys side chain with (2-[2-(2-amino-ethoxy)-ethoxy]-acetyl)2-(gamma-Glu)-CO-(CH2)12-CO 2H
  MOD_RES (39)..(39): Ser at position 39 is amidated

SEQ ID NO: 107 - protein, 39 aa, Artificial Sequence; identical to SEQ ID NO: 11
  Synthetic Construct
  MISC_FEATURE (2)..(2): Xaa at position 2 is Aib
  MISC_FEATURE (6)..(6): Xaa at position 6 is alpha-methyl-Phe(2F)
  MISC_FEATURE (10)..(10): Xaa at position 10 is ChG
  MISC_FEATURE (13)..(13): Xaa at position 13 is alpha-methyl-Leu
  MISC_FEATURE (16)..(16): Xaa at position 16 is Orn
  MOD_RES (17)..(17): Lys at position 17 is chemically modified by conjugation of the epsilon-amino group of the Lys side chain with (2-[2-(2-amino-ethoxy)-ethoxy]-acetyl)2-(gamma-Glu)-CO-(CH2)12-CO 2H
  MISC_FEATURE (20)..(20): Xaa at position 20 is Aib
  MISC_FEATURE (24)..(24): Xaa at position 24 is D-Glu
  MISC_FEATURE (25)..(25): Xaa at position 25 is alpha-methyl-Tyr
  MOD_RES (31)..(31): Lys at position 31 is chemically modified by conjugation of the epsilon-amino group of the Lys side chain with (2-[2-(2-amino-ethoxy)-ethoxy]-acetyl)2-(gamma-Glu)-CO-(CH2)12-CO 2H
  MOD_RES (39)..(39): Ser at position 39 is amidated

SEQ ID NO: 108 - protein, 39 aa, Artificial Sequence; identical to SEQ ID NO: 11
  Synthetic Construct
  MISC_FEATURE (2)..(2): Xaa at position 2 is Aib
  MISC_FEATURE (6)..(6): Xaa at position 6 is alpha-methyl-Phe(2F)
  MISC_FEATURE (10)..(10): Xaa at position 10 is ChA
  MISC_FEATURE (13)..(13): Xaa at position 13 is alpha-methyl-Leu
  MISC_FEATURE (16)..(16): Xaa at position 16 is Orn
  MOD_RES (17)..(17): Lys at position 17 is chemically modified by conjugation of the epsilon-amino group of the Lys side chain with (2-[2-(2-amino-ethoxy)-ethoxy]-acetyl)2-(gamma-Glu)-CO-(CH2)12-CO 2H
  MISC_FEATURE (20)..(20): Xaa at position 20 is Aib
  MISC_FEATURE (24)..(24): Xaa at position 24 is D-Glu
  MISC_FEATURE (25)..(25): Xaa at position 25 is alpha-methyl-Tyr
  MOD_RES (31)..(31): Lys at position 31 is chemically modified by conjugation of the epsilon-amino group of the Lys side chain with (2-[2-(2-amino-ethoxy)-ethoxy]-acetyl)2-(gamma-Glu)-CO-(CH2)12-CO 2H
  MOD_RES (39)..(39): Ser at position 39 is amidated

SEQ ID NO: 109 - protein, 39 aa, Artificial Sequence; identical to SEQ ID NO: 57
  Synthetic Construct
  MISC_FEATURE (2)..(2): Xaa at position 2 is Aib
  MISC_FEATURE (6)..(6): Xaa at position 6 is alpha-methyl-Phe(2F)
  MISC_FEATURE (10)..(10): Xaa at position 10 is 4Pal
  MISC_FEATURE (13)..(13): Xaa at position 13 is alpha-methyl-Leu
  MISC_FEATURE (16)..(16): Xaa at position 16 is Orn
  MOD_RES (17)..(17): Lys at position 17 is chemically modified by conjugation of the epsilon-amino group of the Lys side chain with (2-[2-(2-amino-ethoxy)-ethoxy]-acetyl)2-(gamma-Glu)-CO-(CH2)12-CO 2H
  MISC_FEATURE (20)..(20): Xaa at position 20 is Aib
  MISC_FEATURE (22)..(22): Xaa at position 22 is 2Nal
  MISC_FEATURE (24)..(24): Xaa at position 24 is D-Glu
  MISC_FEATURE (25)..(25): Xaa at position 25 is alpha-methyl-Tyr
  MOD_RES (31)..(31): Lys at position 31 is chemically modified by conjugation of the epsilon-amino group of the Lys side chain with (2-[2-(2-amino-ethoxy)-ethoxy]-acetyl)2-(gamma-Glu)-CO-(CH2)12-CO 2H
  MOD_RES (39)..(39): Ser at position 39 is amidated

SEQ ID NO: 110 - protein, 39 aa, Artificial Sequence
  Synthetic Construct
  MISC_FEATURE (2)..(2): Xaa at position 2 is Aib
  MISC_FEATURE (6)..(6): Xaa at position 6 is alpha-methyl-Phe(2F)
  MISC_FEATURE (10)..(10): Xaa at position 10 is 4Pal
  MISC_FEATURE (13)..(13): Xaa at position 13 is alpha-methyl-Leu
  MISC_FEATURE (16)..(16): Xaa at position 16 is Orn
  MOD_RES (17)..(17): Lys at position 17 is chemically modified by conjugation of the epsilon-amino group of the Lys side chain with (2-[2-(2-amino-ethoxy)-ethoxy]-acetyl)2-(gamma-Glu)-CO-(CH2)12-CO 2H
  MISC_FEATURE (20)..(20): Xaa at position 20 is Aib
  MISC_FEATURE (24)..(24): Xaa at position 24 is D-Glu
  MISC_FEATURE (25)..(25): Xaa at position 25 is alpha-methyl-Tyr
  MOD_RES (31)..(31): Lys at position 31 is chemically modified by conjugation of the epsilon-amino group of the Lys side chain with (2-[2-(2-amino-ethoxy)-ethoxy]-acetyl)2-(gamma-Glu)-CO-(CH2)12-CO 2H
  MOD_RES (39)..(39): Ser at position 39 is amidated
YXEGTXTSDXGIXLDXKAQXEFIXXLIEGGKSSGAPPPS

SEQ ID NO: 111 - protein, 39 aa, Artificial Sequence
  Synthetic Construct
  MISC_FEATURE (2)..(2): Xaa at position 2 is Aib
  MISC_FEATURE (6)..(6): Xaa at position 6 is alpha-methyl-Phe(2F)
  MISC_FEATURE (10)..(10): Xaa at position 10 is 4Pal
  MISC_FEATURE (13)..(13): Xaa at position 13 is alpha-methyl-Leu
  MOD_RES (17)..(17): Lys at position 17 is chemically modified by conjugation of the epsilon-amino group of the Lys side chain with (2-[2-(2-amino-ethoxy)-ethoxy]-acetyl)2-(gamma-Glu)-CO-(CH2)12-CO 2H
  MISC_FEATURE (20)..(20): Xaa at position 20 is Aib
  MISC_FEATURE (24)..(24): Xaa at position 24 is D-Glu
  MISC_FEATURE (25)..(25): Xaa at position 25 is alpha-methyl-Tyr
  MOD_RES (31)..(31): Lys at position 31 is chemically modified by conjugation of the epsilon-amino group of the Lys side chain with (2-[2-(2-amino-ethoxy)-ethoxy]-acetyl)2-(gamma-Glu)-CO-(CH2)12-CO 2H
  MOD_RES (39)..(39): Ser at position 39 is amidated
YXEGTXTSDXSIXLDGKAQXEFIXXLIEGGKSSGAPPPS

SEQ ID NO: 112 - protein, 39 aa, Artificial Sequence
  Synthetic Construct
  MISC_FEATURE (2)..(2): Xaa at position 2 is Aib
  MISC_FEATURE (6)..(6): Xaa at position 6 is alpha-methyl-Phe(2F)
  MISC_FEATURE (10)..(10): Xaa at position 10 is 4Pal
  MISC_FEATURE (13)..(13): Xaa at position 13 is alpha-methyl-Leu
  MISC_FEATURE (16)..(16): Xaa at position 16 is Orn
  MOD_RES (17)..(17): Lys at position 17 is chemically modified by conjugation of the epsilon-amino group of the Lys side chain with (2-[2-(2-amino-ethoxy)-ethoxy]-acetyl)2-(gamma-Glu)-CO-(CH2)12-CO 2H
  MISC_FEATURE (20)..(20): Xaa at position 20 is Aib
  MISC_FEATURE (24)..(24): Xaa at position 24 is D-Glu
  MISC_FEATURE (25)..(25): Xaa at position 25 is alpha-methyl-Tyr
  MOD_RES (31)..(31): Lys at position 31 is chemically modified by conjugation of the epsilon-amino group of the Lys side chain with (2-[2-(2-amino-ethoxy)-ethoxy]-acetyl)2-(gamma-Glu)-CO-(CH2)12-CO 2H
  MOD_RES (39)..(39): Ser at position 39 is amidated
YXEGTXTSDXSIXLDXKGQXEFIXXLIEGGKSSGAPPPS

SEQ ID NO: 113 - protein, 39 aa, Artificial Sequence
  Synthetic Construct
  MISC_FEATURE (2)..(2): Xaa at position 2 is Aib
  MISC_FEATURE (6)..(6): Xaa at position 6 is alpha-methyl-Phe(2F)
  MISC_FEATURE (10)..(10): Xaa at position 10 is 4Pal
  MISC_FEATURE (13)..(13): Xaa at position 13 is alpha-methyl-Leu
  MISC_FEATURE (16)..(16): Xaa at position 16 is Orn
  MOD_RES (17)..(17): Lys at position 17 is chemically modified by conjugation of the epsilon-amino group of the Lys side chain with (2-[2-(2-amino-ethoxy)-ethoxy]-acetyl)2-(gamma-Glu)-CO-(CH2)12-CO 2H
  MISC_FEATURE (20)..(20): Xaa at position 20 is Aib
  MISC_FEATURE (24)..(24): Xaa at position 24 is D-Glu
  MISC_FEATURE (25)..(25): Xaa at position 25 is alpha-methyl-Tyr
  MOD_RES (31)..(31): Lys at position 31 is chemically modified by conjugation of the epsilon-amino group of the Lys side chain with (2-[2-(2-amino-ethoxy)-ethoxy]-acetyl)2-(gamma-Glu)-CO-(CH2)12-CO 2H
  MOD_RES (39)..(39): Ser at position 39 is amidated
YXEGTXTSDXSIXLDXKAQXGFIXXLIEGGKSSGAPPPS

SEQ ID NO: 114 - protein, 39 aa, Artificial Sequence
  Synthetic Construct
  MISC_FEATURE (2)..(2): Xaa at position 2 is Aib
  MISC_FEATURE (6)..(6): Xaa at position 6 is alpha-methyl-Phe(2F)
  MISC_FEATURE (10)..(10): Xaa at position 10 is 4Pal
  MISC_FEATURE (13)..(13): Xaa at position 13 is alpha-methyl-Leu
  MISC_FEATURE (16)..(16): Xaa at position 16 is Orn
  MOD_RES (17)..(17): Lys at position 17 is chemically modified by conjugation of the epsilon-amino group of the Lys side chain with (2-[2-(2-amino-ethoxy)-ethoxy]-acetyl)2-(gamma-Glu)-CO-(CH2)12-CO 2H
  MISC_FEATURE (20)..(20): Xaa at position 20 is Aib
  MISC_FEATURE (25)..(25): Xaa at position 25 is alpha-methyl-Tyr
  MOD_RES (31)..(31): Lys at position 31 is chemically modified by conjugation of the epsilon-amino group of the Lys side chain with (2-[2-(2-amino-ethoxy)-ethoxy]-acetyl)2-(gamma-Glu)-CO-(CH2)12-CO 2H
  MOD_RES (39)..(39): Ser at position 39 is amidated
YXEGTXTSDXSIXLDXKAQXEFIGXLIEGGKSSGAPPPS

SEQ ID NO: 115 - protein, 39 aa, Artificial Sequence
  Synthetic Construct
  MISC_FEATURE (2)..(2): Xaa at position 2 is Aib
  MISC_FEATURE (6)..(6): Xaa at position 6 is alpha-methyl-Phe(2F)
  MOD_RES (10)..(10): Lys at position 10 is chemically modified by conjugation of the epsilon-amino group of the Lys side chain with (2-[2-(2-amino-ethoxy)-ethoxy]-acetyl)2-(gamma-Glu)-CO-(CH2)12-CO 2H
  MISC_FEATURE (13)..(13): Xaa at position 13 is alpha-methyl-Leu
  MISC_FEATURE (16)..(16): Xaa at position 16 is Orn
  MISC_FEATURE (20)..(20): Xaa at position 20 is Aib
  MOD_RES (21)..(21): Lys at position 21 is chemically modified by conjugation of the epsilon-amino group of the Lys side chain with (2-[2-(2-amino-ethoxy)-ethoxy]-acetyl)2-(gamma-Glu)-CO-(CH2)12-CO 2H
  MISC_FEATURE (24)..(24): Xaa at position 24 is D-Glu
  MISC_FEATURE (25)..(25): Xaa at position 25 is alpha-methyl-Tyr
  MOD_RES (39)..(39): Ser at position 39 is amidated
YXEGTXTSDKSIXLDXIAQXKFIXXLIEGGPSSGAPPPS

SEQ ID NO: 116 - protein, 39 aa, Artificial Sequence
  Synthetic Construct
  MISC_FEATURE (2)..(2): Xaa at position 2 is Aib
  MISC_FEATURE (6)..(6): Xaa at position 6 is alpha-methyl-Phe(2F)
  MOD_RES (10)..(10): Lys at position 10 is chemically modified by conjugation of the epsilon-amino group of the Lys side chain with (2-[2-(2-amino-ethoxy)-ethoxy]-acetyl)2-(gamma-Glu)-CO-(CH2)12-CO 2H
  MISC_FEATURE (13)..(13): Xaa at position 13 is alpha-methyl-Leu
  MISC_FEATURE (16)..(16): Xaa at position 16 is Orn
  MISC_FEATURE (20)..(20): Xaa at position 20 is Aib
  MOD_RES (24)..(24): Lys at position 24 is chemically modified by conjugation of the epsilon-amino group of the Lys side chain with (2-[2-(2-amino-ethoxy)-ethoxy]-acetyl)2-(gamma-Glu)-CO-(CH2)12-CO 2H
  MISC_FEATURE (25)..(25): Xaa at position 25 is alpha-methyl-Tyr
  MOD_RES (39)..(39): Ser at position 39 is amidated
YXEGTXTSDKSIXLDXIAQXEFIKXLIEGGPSSGAPPPS

SEQ ID NO: 117 - protein, 39 aa, Artificial Sequence
  Synthetic Construct
  MISC_FEATURE (2)..(2): Xaa at position 2 is Aib
  MISC_FEATURE (6)..(6): Xaa at position 6 is alpha-methyl-Phe(2F)
  MOD_RES (10)..(10): Lys at position 10 is chemically modified by conjugation of the epsilon-amino group of the Lys side chain with (2-[2-(2-amino-ethoxy)-ethoxy]-acetyl)2-(gamma-Glu)-CO-(CH2)12-CO 2H
  MISC_FEATURE (13)..(13): Xaa at position 13 is alpha-methyl-Leu
  MISC_FEATURE (16)..(16): Xaa at position 16 is Orn
  MISC_FEATURE (20)..(20): Xaa at position 20 is Aib
  MISC_FEATURE (24)..(24): Xaa at position 24 is D-Glu
  MISC_FEATURE (25)..(25): Xaa at position 25 is alpha-methyl-Tyr
  MOD_RES (28)..(28): Lys at position 28 is chemically modified by conjugation of the epsilon-amino group of the Lys side chain with (2-[2-(2-amino-ethoxy)-ethoxy]-acetyl)2-(gamma-Glu)-CO-(CH2)12-CO 2H
  MOD_RES (39)..(39): Ser at position 39 is amidated
YXEGTXTSDKSIXLDXIAQXEFIXXLIKGGPSSGAPPPS

SEQ ID NO: 118 - protein, 39 aa, Artificial Sequence
  Synthetic Construct
  MISC_FEATURE (2)..(2): Xaa at position 2 is Aib
  MISC_FEATURE (6)..(6): Xaa at position 6 is alpha-methyl-Phe(2F)
  MOD_RES (10)..(10): Lys at position 10 is chemically modified by conjugation of the epsilon-amino group of the Lys side chain with (2-[2-(2-amino-ethoxy)-ethoxy]-acetyl)2-(gamma-Glu)-CO-(CH2)12-CO 2H
  MISC_FEATURE (13)..(13): Xaa at position 13 is alpha-methyl-Leu
  MISC_FEATURE (16)..(16): Xaa at position 16 is Orn
  MISC_FEATURE (20)..(20): Xaa at position 20 is Aib
  MISC_FEATURE (24)..(24): Xaa at position 24 is D-Glu
  MISC_FEATURE (25)..(25): Xaa at position 25 is alpha-methyl-Tyr
  MOD_RES (31)..(31): Lys at position 31 is chemically modified by conjugation of the epsilon-amino group of the Lys side chain with (2-[2-(2-amino-ethoxy)-ethoxy]-acetyl)2-(gamma-Glu)-CO-(CH2)12-CO 2H
  MOD_RES (39)..(39): Ser at position 39 is amidated
YXEGTXTSDKSIXLDXIAQXEFIXXLIEGGKSSGAPPPS

SEQ ID NO: 119 - protein, 39 aa, Artificial Sequence
  Synthetic Construct
  MISC_FEATURE (2)..(2): Xaa at position 2 is Aib
  MISC_FEATURE (6)..(6): Xaa at position 6 is alpha-methyl-Phe(2F)
  MOD_RES (10)..(10): Lys at position 10 is chemically modified by conjugation of the epsilon-amino group of the Lys side chain with (2-[2-(2-amino-ethoxy)-ethoxy]-acetyl)2-(gamma-Glu)-CO-(CH2)12-CO 2H
  MISC_FEATURE (13)..(13): Xaa at position 13 is alpha-methyl-Leu
  MISC_FEATURE (16)..(16): Xaa at position 16 is Orn
  MISC_FEATURE (20)..(20): Xaa at position 20 is Aib
  MOD_RES (21)..(21): Lys at position 21 is chemically modified by conjugation of the epsilon-amino group of the Lys side chain with (2-[2-(2-amino-ethoxy)-ethoxy]-acetyl)2-(gamma-Glu)-CO-(CH2)12-CO 2H
  MISC_FEATURE (22)..(22): Xaa at position 22 is alpha-methyl-Phe
  MISC_FEATURE (24)..(24): Xaa at position 24 is D-Glu
  MISC_FEATURE (25)..(25): Xaa at position 25 is alpha-methyl-Tyr
  MOD_RES (39)..(39): Ser at position 39 is amidated
YXEGTXTSDKSIXLDXIAQXKXIXXLIEGGPSSGAPPPS

SEQ ID NO: 120 - protein, 39 aa, Artificial Sequence
  Synthetic Construct
  MISC_FEATURE (2)..(2): Xaa at position 2 is Aib
  MISC_FEATURE (6)..(6): Xaa at position 6 is alpha-methyl-Phe(2F)
  MOD_RES (10)..(10): Lys at position 10 is chemically modified by conjugation of the epsilon-amino group of the Lys side chain with (2-[2-(2-amino-ethoxy)-ethoxy]-acetyl)2-(gamma-Glu)-CO-(CH2)12-CO 2H
  MISC_FEATURE (13)..(13): Xaa at position 13 is alpha-methyl-Leu
  MISC_FEATURE (16)..(16): Xaa at position 16 is Orn
  MISC_FEATURE (20)..(20): Xaa at position 20 is Aib
  MISC_FEATURE (22)..(22): Xaa at position 22 is alpha-methyl-Phe
  MOD_RES (24)..(24): Lys at position 24 is chemically modified by conjugation of the epsilon-amino group of the Lys side chain with (2-[2-(2-amino-ethoxy)-ethoxy]-acetyl)2-(gamma-Glu)-CO-(CH2)12-CO 2H
  MISC_FEATURE (25)..(25): Xaa at position 25 is alpha-methyl-Tyr
  MOD_RES (39)..(39): Ser at position 39 is amidated
YXEGTXTSDKSIXLDXIAQXEXIKXLIEGGPSSGAPPPS

SEQ ID NO: 121 - protein, 39 aa, Artificial Sequence
  Synthetic Construct
  MISC_FEATURE (2)..(2): Xaa at position 2 is Aib
  MISC_FEATURE (6)..(6): Xaa at position 6 is alpha-methyl-Phe(2F)
  MOD_RES (10)..(10): Lys at position 10 is chemically modified by conjugation of the epsilon-amino group of the Lys side chain with (2-[2-(2-amino-ethoxy)-ethoxy]-acetyl)2-(gamma-Glu)-CO-(CH2)12-CO 2H
  MISC_FEATURE (13)..(13): Xaa at position 13 is alpha-methyl-Leu
  MISC_FEATURE (16)..(16): Xaa at position 16 is Orn
  MISC_FEATURE (20)..(20): Xaa at position 20 is Aib
  MISC_FEATURE (22)..(22): Xaa at position 22 is alpha-methyl-Phe
  MISC_FEATURE (24)..(24): Xaa at position 24 is D-Glu
  MISC_FEATURE (25)..(25): Xaa at position 25 is alpha-methyl-Tyr
  MOD_RES (28)..(28): Lys at position 28 is chemically modified by conjugation of the epsilon-amino group of the Lys side chain with (2-[2-(2-amino-ethoxy)-ethoxy]-acetyl)2-(gamma-Glu)-CO-(CH2)12-CO 2H
  MOD_RES (39)..(39): Ser at position 39 is amidated
YXEGTXTSDKSIXLDXIAQXEXIXXLIKGGPSSGAPPPS

SEQ ID NO: 122 - protein, 39 aa, Artificial Sequence
  Synthetic Construct
  MISC_FEATURE (2)..(2): Xaa at position 2 is Aib
  MISC_FEATURE (6)..(6): Xaa at position 6 is alpha-methyl-Phe(2F)
  MOD_RES (10)..(10): Lys at position 10 is chemically modified by conjugation of the epsilon-amino group of the Lys side chain with (2-[2-(2-amino-ethoxy)-ethoxy]-acetyl)2-(gamma-Glu)-CO-(CH2)12-CO 2H
  MISC_FEATURE (13)..(13): Xaa at position 13 is alpha-methyl-Leu
  MISC_FEATURE (16)..(16): Xaa at position 16 is Orn
  MISC_FEATURE (20)..(20): Xaa at position 20 is Aib
  MISC_FEATURE (22)..(22): Xaa at position 22 is alpha-methyl-Phe
  MISC_FEATURE (24)..(24): Xaa at position 24 is D-Glu
  MISC_FEATURE (25)..(25): Xaa at position 25 is alpha-methyl-Tyr
  MOD_RES (31)..(31): Lys at position 31 is chemically modified by conjugation of the epsilon-amino group of the Lys side chain with (2-[2-(2-amino-ethoxy)-ethoxy]-acetyl)2-(gamma-Glu)-CO-(CH2)12-CO 2H
  MOD_RES (39)..(39): Ser at position 39 is amidated
YXEGTXTSDKSIXLDXIAQXEXIXXLIEGGKSSGAPPPS

SEQ ID NO: 123 - protein, 39 aa, Artificial Sequence
  Synthetic Construct
  MISC_FEATURE (2)..(2): Xaa at position 2 is Aib
  MISC_FEATURE (6)..(6): Xaa at position 6 is alpha-methyl-Phe(2F)
  MISC_FEATURE (10)..(10): Xaa at position 10 is 4Pal
  MISC_FEATURE (11)..(11): Xaa at position 11 is Aib
  MISC_FEATURE (13)..(13): Xaa at position 13 is alpha-methyl-Leu
  MISC_FEATURE (16)..(16): Xaa at position 16 is Orn
  MOD_RES (17)..(17): Lys at position 17 is chemically modified by conjugation of the epsilon-amino group of the Lys side chain with (2-[2-(2-amino-ethoxy)-ethoxy]-acetyl)2-(gamma-Glu)-CO-(CH2)12-CO 2H
  MISC_FEATURE (20)..(20): Xaa at position 20 is Aib
  MOD_RES (24)..(24): Lys at position 24 is chemically modified by conjugation of the epsilon-amino group of the Lys side chain with (2-[2-(2-amino-ethoxy)-ethoxy]-acetyl)2-(gamma-Glu)-CO-(CH2)12-CO 2H
  MISC_FEATURE (25)..(25): Xaa at position 25 is alpha-methyl-Tyr
  MOD_RES (39)..(39): Ser at position 39 is amidated
YXEGTXTSDXXIXLDXKAQXEFIKXLIEGGPSSGAPPPS

SEQ ID NO: 124 - protein, 39 aa, Artificial Sequence
  Synthetic Construct
  MISC_FEATURE (2)..(2): Xaa at position 2 is Aib
  MISC_FEATURE (6)..(6): Xaa at position 6 is alpha-methyl-Phe(2F)
  MISC_FEATURE (13)..(13): Xaa at position 13 is alpha-methyl-Leu
  MISC_FEATURE (16)..(16): Xaa at position 16 is Orn
  MOD_RES (17)..(17): Lys at position 17 is chemically modified by conjugation of the epsilon-amino group of the Lys side chain with (2-[2-(2-amino-ethoxy)-ethoxy]-acetyl)2-(gamma-Glu)-CO-(CH2)12-CO 2H
  MISC_FEATURE (20)..(20): Xaa at position 20 is Aib
  MOD_RES (24)..(24): Lys at position 24 is chemically modified by conjugation of the epsilon-amino group of the Lys side chain with (2-[2-(2-amino-ethoxy)-ethoxy]-acetyl)2-(gamma-Glu)-CO-(CH2)12-CO 2H
  MISC_FEATURE (25)..(25): Xaa at position 25 is alpha-methyl-Tyr
  MOD_RES (39)..(39): Ser at position 39 is amidated
YXEGTXTSDVSIXLDXKAQXEFIKXLIEGGPSSGAPPPS

SEQ ID NO: 125 - protein, 39 aa, Artificial Sequence
  Synthetic Construct
  MISC_FEATURE (2)..(2): Xaa at position 2 is Aib
  MISC_FEATURE (6)..(6): Xaa at position 6 is alpha-methyl-Phe(2F)
  MISC_FEATURE (11)..(11): Xaa at position 11 is Aib
  MISC_FEATURE (13)..(13): Xaa at position 2 is Aib
  MISC_FEATURE (16)..(16): Xaa at position 16 is Orn
  MOD_RES (17)..(17): Lys at position 17 is chemically modified by conjugation of the epsilon-amino group of the Lys side chain with (2-[2-(2-amino-ethoxy)-ethoxy]-acetyl)2-(gamma-Glu)-CO-(CH2)12-CO 2H
  MISC_FEATURE (20)..(20): Xaa at position 20 is Aib
  MOD_RES (24)..(24): Lys at position 24 is chemically modified by conjugation of the epsilon-amino group of the Lys side chain with (2-[2-(2-amino-ethoxy)-ethoxy]-acetyl)2-(gamma-Glu)-CO-(CH2)12-CO 2H
  MISC_FEATURE (25)..(25): Xaa at position 25 is alpha-methyl-Tyr
  MOD_RES (39)..(39): Ser at position 39 is amidated
YXEGTXTSDVXIXLDXKAQXEFIKXLIEGGPSSGAPPPS

SEQ ID NO: 126 - protein, 39 aa, Artificial Sequence; identical to SEQ ID NO: 26
  Synthetic Construct
  MISC_FEATURE (2)..(2): Xaa at position 2 is Aib
  MISC_FEATURE (6)..(6): Xaa at position 6 is alpha-methyl-Phe(2F)
  MISC_FEATURE (10)..(10): Xaa at position 10 is Ac5c
  MISC_FEATURE (13)..(13): Xaa at position 13 is alpha-methyl-Leu
  MISC_FEATURE (16)..(16): Xaa at position 16 is Orn
  MOD_RES (17)..(17): Lys at position 17 is chemically modified by conjugation of the epsilon-amino group of the Lys side chain with (2-[2-(2-amino-ethoxy)-ethoxy]-acetyl)2-(gamma-Glu)-CO-(CH2)12-CO 2H
  MISC_FEATURE (20)..(20): Xaa at position 20 is Aib
  MOD_RES (24)..(24): Lys at position 24 is chemically modified by conjugation of the epsilon-amino group of the Lys side chain with (2-[2-(2-amino-ethoxy)-ethoxy]-acetyl)2-(gamma-Glu)-CO-(CH2)12-CO 2H
  MISC_FEATURE (25)..(25): Xaa at position 25 is alpha-methyl-Tyr
  MOD_RES (39)..(39): Ser at position 39 is amidated

SEQ ID NO: 127 - protein, 39 aa, Artificial Sequence
  Synthetic Construct
  MISC_FEATURE (2)..(2): Xaa at position 2 is Aib
  MISC_FEATURE (6)..(6): Xaa at position 6 is alpha-methyl-Phe(2F)
  MISC_FEATURE (10)..(10): Xaa at position 10 is 4Pal
  MISC_FEATURE (11)..(11): Xaa at position 11 is Aib
  MISC_FEATURE (13)..(13): Xaa at position 13 is alpha-methyl-Leu
  MISC_FEATURE (16)..(16): Xaa at position 16 is Orn
  MOD_RES (17)..(17): Lys at position 17 is chemically modified by conjugation of the epsilon-amino group of the Lys side chain with (2-[2-(2-amino-ethoxy)-ethoxy]-acetyl)2-(gamma-Glu)-CO-(CH2)12-CO 2H
  MISC_FEATURE (20)..(20): Xaa at position 20 is Aib
  MISC_FEATURE (22)..(22): Xaa at position 22 is alpha-methyl-Phe
  MOD_RES (24)..(24): Lys at position 24 is chemically modified by conjugation of the epsilon-amino group of the Lys side chain with (2-[2-(2-amino-ethoxy)-ethoxy]-acetyl)2-(gamma-Glu)-CO-(CH2)12-CO 2H
  MISC_FEATURE (25)..(25): Xaa at position 25 is alpha-methyl-Tyr
  MOD_RES (39)..(39): Ser at position 39 is amidated
YXEGTXTSDXXIXLDXKAQXEXIKXLIEGGPSSGAPPPS

SEQ ID NO: 128 - protein, 39 aa, Artificial Sequence
  Synthetic Construct
  MISC_FEATURE (2)..(2): Xaa at position 2 is Aib
  MISC_FEATURE (6)..(6): Xaa at position 6 is alpha-methyl-Phe(2F)
  MISC_FEATURE (13)..(13): Xaa at position 13 is alpha-methyl-Leu
  MISC_FEATURE (16)..(16): Xaa at position 16 is Orn
  MOD_RES (17)..(17): Lys at position 17 is chemically modified by conjugation of the epsilon-amino group of the Lys side chain with (2-[2-(2-amino-ethoxy)-ethoxy]-acetyl)2-(gamma-Glu)-CO-(CH2)12-CO 2H
  MISC_FEATURE (20)..(20): Xaa at position 20 is Aib
  MISC_FEATURE (22)..(22): Xaa at position 22 is alpha-methyl-Phe
  MOD_RES (24)..(24): Lys at position 24 is chemically modified by conjugation of the epsilon-amino group of the Lys side chain with (2-[2-(2-amino-ethoxy)-ethoxy]-acetyl)2-(gamma-Glu)-CO-(CH2)12-CO 2H
  MISC_FEATURE (25)..(25): Xaa at position 25 is alpha-methyl-Tyr
  MOD_RES (39)..(39): Ser at position 39 is amidated
YXEGTXTSDVSIXLDXKAQXEXIKXLIEGGPSSGAPPPS

SEQ ID NO: 129 - protein, 39 aa, Artificial Sequence
  Synthetic Construct
  MISC_FEATURE (2)..(2): Xaa at position 2 is Aib
  MISC_FEATURE (6)..(6): Xaa at position 6 is alpha-methyl-Phe(2F)
  MISC_FEATURE (11)..(11): Xaa at position 11 is Aib
  MISC_FEATURE (13)..(13): Xaa at position 13 is alpha-methyl-Leu
  MISC_FEATURE (16)..(16): Xaa at position 16 is Orn
  MOD_RES (17)..(17): Lys at position 17 is chemically modified by conjugation of the epsilon-amino group of the Lys side chain with (2-[2-(2-amino-ethoxy)-ethoxy]-acetyl)2-(gamma-Glu)-CO-(CH2)12-CO 2H
  MISC_FEATURE (20)..(20): Xaa at position 20 is Aib
  MISC_FEATURE (22)..(22): Xaa at position 22 is alpha-methyl-Phe
  MOD_RES (24)..(24): Lys at position 24 is chemically modified by conjugation of the epsilon-amino group of the Lys side chain with (2-[2-(2-amino-ethoxy)-ethoxy]-acetyl)2-(gamma-Glu)-CO-(CH2)12-CO 2H
  MISC_FEATURE (25)..(25): Xaa at position 25 is alpha-methyl-Tyr
  MOD_RES (39)..(39): Ser at position 39 is amidated
YXEGTXTSDVXIXLDXKAQXEXIKXLIEGGPSSGAPPPS

SEQ ID NO: 130 - protein, 39 aa, Artificial Sequence; identical to SEQ ID NO: 92
  Synthetic Construct
  MISC_FEATURE (2)..(2): Xaa at position 2 is Aib
  MISC_FEATURE (6)..(6): Xaa at position 6 is alpha-methyl-Phe(2F)
  MISC_FEATURE (10)..(10): Xaa at position 10 is Ac5c
  MISC_FEATURE (13)..(13): Xaa at position 13 is alpha-methyl-Leu
  MISC_FEATURE (16)..(16): Xaa at position 16 is Orn
  MOD_RES (17)..(17): Lys at position 17 is chemically modified by conjugation of the epsilon-amino group of the Lys side chain with (2-[2-(2-amino-ethoxy)-ethoxy]-acetyl)2-(gamma-Glu)-CO-(CH2)12-CO 2H
  MISC_FEATURE (20)..(20): Xaa at position 20 is Aib
  MISC_FEATURE (22)..(22): Xaa at position 22 is alpha-methyl-Phe
  MOD_RES (24)..(24): Lys at position 24 is chemically modified by conjugation of the epsilon-amino group of the Lys side chain with (2-[2-(2-amino-ethoxy)-ethoxy]-acetyl)2-(gamma-Glu)-CO-(CH2)12-CO 2H
  MISC_FEATURE (25)..(25): Xaa at position 25 is alpha-methyl-Tyr
  MOD_RES (39)..(39): Ser at position 39 is amidated

SEQ ID NO: 131 - protein, 39 aa, Artificial Sequence; identical to SEQ ID NO: 127
  Synthetic Construct
  MISC_FEATURE (2)..(2): Xaa at position 2 is Aib
  MISC_FEATURE (6)..(6): Xaa at position 6 is alpha-methyl-Phe(2F)
  MISC_FEATURE (10)..(10): Xaa at position 10 is 4Pal
  MISC_FEATURE (11)..(11): Xaa at position 11 is Aib
  MISC_FEATURE (13)..(13): Xaa at position 13 is alpha-methyl-Leu
  MISC_FEATURE (16)..(16): Xaa at position 16 is Orn
  MOD_RES (17)..(17): Lys at position 17 is chemically modified by conjugation of the epsilon-amino group of the Lys side chain with (2-[2-(2-amino-ethoxy)-ethoxy]-acetyl)2-(gamma-Glu)-CO-(CH2)12-CO 2H
  MISC_FEATURE (20)..(20): Xaa at position 20 is Aib
  MISC_FEATURE (22)..(22): Xaa at position 22 is alpha-methyl-Phe
  MOD_RES (24)..(24): Lys at position 24 is chemically modified by conjugation of the epsilon-amino group of the Lys side chain with (2-[2-(2-amino-ethoxy)-ethoxy]-acetyl)2-(gamma-Glu)-CO-(CH2)12-CO 2H
  MISC_FEATURE (25)..(25): Xaa at position 25 is alpha-methyl-Phe
  MOD_RES (39)..(39): Ser at position 39 is amidated

SEQ ID NO: 132 - protein, 39 aa, Artificial Sequence; identical to SEQ ID NO: 128
  Synthetic Construct
  MISC_FEATURE (2)..(2): Xaa at position 2 is Aib
  MISC_FEATURE (6)..(6): Xaa at position 6 is alpha-methyl-Phe(2F)
  MISC_FEATURE (13)..(13): Xaa at position 13 is alpha-methyl-Leu
  MISC_FEATURE (16)..(16): Xaa at position 16 is Orn
  MOD_RES (17)..(17): Lys at position 17 is chemically modified by conjugation of the epsilon-amino group of the Lys side chain with (2-[2-(2-amino-ethoxy)-ethoxy]-acetyl)2-(gamma-Glu)-CO-(CH2)12-CO 2H
  MISC_FEATURE (20)..(20): Xaa at position 20 is Aib
  MISC_FEATURE (22)..(22): Xaa at position 22 is alpha-methyl-Phe
  MOD_RES (24)..(24): Lys at position 24 is chemically modified by conjugation of the epsilon-amino group of the Lys side chain with (2-[2-(2-amino-ethoxy)-ethoxy]-acetyl)2-(gamma-Glu)-CO-(CH2)12-CO 2H
  MISC_FEATURE (25)..(25): Xaa at position 25 is alpha-methyl-Phe
  MOD_RES (39)..(39): Ser at position 39 is amidated

SEQ ID NO: 133 - protein, 39 aa, Artificial Sequence; identical to SEQ ID NO: 129
  Synthetic Construct
  MISC_FEATURE (2)..(2): Xaa at position 2 is Aib
  MISC_FEATURE (6)..(6): Xaa at position 6 is alpha-methyl-Phe(2F)
  MISC_FEATURE (11)..(11): Xaa at position 11 is Aib
  MISC_FEATURE (13)..(13): Xaa at position 13 is alpha-methyl-Leu
  MISC_FEATURE (16)..(16): Xaa at position 16 is Orn
  MOD_RES (17)..(17): Lys at position 17 is chemically modified by conjugation of the epsilon-amino group of the Lys side chain with (2-[2-(2-amino-ethoxy)-ethoxy]-acetyl)2-(gamma-Glu)-CO-(CH2)12-CO 2H
  MISC_FEATURE (20)..(20): Xaa at position 20 is Aib
  MISC_FEATURE (22)..(22): Xaa at position 22 is alpha-methyl-Phe
  MOD_RES (24)..(24): Lys at position 24 is chemically modified by conjugation of the epsilon-amino group of the Lys side chain with (2-[2-(2-amino-ethoxy)-ethoxy]-acetyl)2-(gamma-Glu)-CO-(CH2)12-CO 2H
  MISC_FEATURE (25)..(25): Xaa at position 25 is alpha-methyl-Phe
  MOD_RES (39)..(39): Ser at position 39 is amidated

SEQ ID NO: 134 - protein, 39 aa, Artificial Sequence; identical to SEQ ID NO: 92
  Synthetic Construct
  MISC_FEATURE (2)..(2): Xaa at position 2 is Aib
  MISC_FEATURE (6)..(6): Xaa at position 6 is alpha-methyl-Phe(2F)
  MISC_FEATURE (10)..(10): Xaa at position 10 is Ac5c
  MISC_FEATURE (13)..(13): Xaa at position 13 is alpha-methyl-Leu
  MISC_FEATURE (16)..(16): Xaa at position 16 is Orn
  MOD_RES (17)..(17): Lys at position 17 is chemically modified by conjugation of the epsilon-amino group of the Lys side chain with (2-[2-(2-amino-ethoxy)-ethoxy]-acetyl)2-(gamma-Glu)-CO-(CH2)12-CO 2H
  MISC_FEATURE (20)..(20): Xaa at position 20 is Aib
  MISC_FEATURE (22)..(22): Xaa at position 22 is alpha-methyl-Phe
  MOD_RES (24)..(24): Lys at position 24 is chemically modified by conjugation of the epsilon-amino group of the Lys side chain with (2-[2-(2-amino-ethoxy)-ethoxy]-acetyl)2-(gamma-Glu)-CO-(CH2)12-CO 2H
  MISC_FEATURE (25)..(25): Xaa at position 25 is alpha-methyl-Phe
  MOD_RES (39)..(39): Ser at position 39 is amidated

SEQ ID NO: 135 - protein, 39 aa, Artificial Sequence; identical to SEQ ID NO: 11
  Synthetic Construct
  MISC_FEATURE (2)..(2): Xaa at position 2 is Aib
  MISC_FEATURE (6)..(6): Xaa at position 6 is alpha-methyl-Phe(2F)
  MISC_FEATURE (10)..(10): Xaa at position 10 is 4Pal
  MISC_FEATURE (13)..(13): Xaa at position 13 is alpha-methyl-Leu
  MISC_FEATURE (16)..(16): Xaa at position 16 is Orn
  MOD_RES (17)..(17): Lys at position 17 is chemically modified by conjugation of the epsilon-amino group of the Lys side chain with (2-[2-(2-amino-ethoxy)-ethoxy]-acetyl)2-(gamma-Glu)-(7-(4-carboxy phenoxy)heptanoyl)
  MISC_FEATURE (20)..(20): Xaa at position 20 is Aib
  MISC_FEATURE (24)..(24): Xaa at position 24 is D-Glu
  MISC_FEATURE (25)..(25): Xaa at position 25 is alpha-methyl-Tyr
  MOD_RES (31)..(31): Lys at position 31 is chemically modified by conjugation of the epsilon-amino group of the Lys side chain with (2-[2-(2-amino-ethoxy)-ethoxy]-acetyl)2-(gamma-Glu)-(7-(4-carboxy phenoxy)heptanoyl)
  MOD_RES (39)..(39): Ser at position 39 is amidated

SEQ ID NO: 136 - protein, 39 aa, Artificial Sequence; identical to SEQ ID NO: 11
  Synthetic Construct
  MISC_FEATURE (2)..(2): Xaa at position 2 is Aib
  MISC_FEATURE (6)..(6): Xaa at position 6 is alpha-methyl-Phe(2F)
  MISC_FEATURE (10)..(10): Xaa at position 10 is 4Pal
  MISC_FEATURE (13)..(13): Xaa at position 13 is alpha-methyl-Leu
  MISC_FEATURE (16)..(16): Xaa at position 16 is Orn
  MOD_RES (17)..(17): Lys at position 17 is chemically modified by conjugation of the epsilon-amino group of the Lys side chain with (2-[2-(2-amino-ethoxy)-ethoxy]-acetyl)2-(gamma-Glu)-(8-(4-carboxy phenoxy)octanoyl)
  MISC_FEATURE (20)..(20): Xaa at position 20 is Aib
  MISC_FEATURE (24)..(24): Xaa at position 24 is D-Glu
  MISC_FEATURE (25)..(25): Xaa at position 25 is alpha-methyl-Tyr
  MOD_RES (31)..(31): Lys at position 31 is chemically modified by conjugation of the epsilon-amino group of the Lys side chain with (2-[2-(2-amino-ethoxy)-ethoxy]-acetyl)2-(gamma-Glu)-(8-(4-carboxy phenoxy)octanoyl)
  MOD_RES (39)..(39): Ser at position 39 is amidated

SEQ ID NO: 137 - protein, 39 aa, Artificial Sequence; identical to SEQ ID NO: 25
  Synthetic Construct
  MISC_FEATURE (2)..(2): Xaa at position 2 is Aib
  MISC_FEATURE (6)..(6): Xaa at position 6 is alpha-methyl-Phe(2F)
  MISC_FEATURE (10)..(10): Xaa at position 10 is 4Pal
  MISC_FEATURE (13)..(13): Xaa at position 13 is alpha-methyl-Leu
  MISC_FEATURE (16)..(16): Xaa at position 16 is Orn
  MOD_RES (17)..(17): Lys at position 17 is chemically modified by conjugation of the epsilon-amino group of the Lys side chain with (2-[2-(2-amino-ethoxy)-ethoxy]-acetyl)2-(gamma-Glu)-(10-(4-carbox yphenoxy)decanoyl)
  MISC_FEATURE (20)..(20): Xaa at position 20 is Aib
  MOD_RES (21)..(21): Lys at position 21 is chemically modified by conjugation of the epsilon-amino group of the Lys side chain with (2-[2-(2-amino-ethoxy)-ethoxy]-acetyl)2-(gamma-Glu)-(10-(4-carbox yphenoxy)decanoyl)
  MISC_FEATURE (24)..(24): Xaa at position 24 is D-Glu
  MISC_FEATURE (25)..(25): Xaa at position 25 is alpha-methyl-Tyr
  MOD_RES (39)..(39): Ser at position 39 is amidated

SEQ ID NO: 138 - protein, 39 aa, Artificial Sequence; identical to SEQ ID NO: 26
  Synthetic Construct
  MISC_FEATURE (2)..(2): Xaa at position 2 is Aib
  MISC_FEATURE (6)..(6): Xaa at position 6 is alpha-methyl-Phe(2F)
  MISC_FEATURE (10)..(10): Xaa at position 10 is 4Pal
  MISC_FEATURE (13)..(13): Xaa at position 13 is alpha-methyl-Leu
  MISC_FEATURE (16)..(16): Xaa at position 16 is Orn
  MOD_RES (17)..(17): Lys at position 17 is chemically modified by conjugation of the epsilon-amino group of the Lys side chain with (2-[2-(2-amino-ethoxy)-ethoxy]-acetyl)2-(gamma-Glu)-(10-(4-carbox yphenoxy)decanoyl)
  MISC_FEATURE (20)..(20): Xaa at position 20 is Aib
  MOD_RES (24)..(24): Lys at position 24 is chemically modified by conjugation of the epsilon-amino group of the Lys side chain with (2-[2-(2-amino-ethoxy)-ethoxy]-acetyl)2-(gamma-Glu)-(10-(4-carbox yphenoxy)decanoyl)
  MISC_FEATURE (25)..(25): Xaa at position 25 is alpha-methyl-Tyr
  MOD_RES (39)..(39): Ser at position 39 is amidated

SEQ ID NO: 139 - protein, 39 aa, Artificial Sequence; identical to SEQ ID NO: 27
  Synthetic Construct
  MISC_FEATURE (2)..(2): Xaa at position 2 is Aib
  MISC_FEATURE (6)..(6): Xaa at position 6 is alpha-methyl-Phe(2F)
  MISC_FEATURE (10)..(10): Xaa at position 10 is 4Pal
  MISC_FEATURE (13)..(13): Xaa at position 13 is alpha-methyl-Leu
  MISC_FEATURE (16)..(16): Xaa at position 16 is Orn
  MOD_RES (17)..(17): Lys at position 17 is chemically modified by conjugation of the epsilon-amino group of the Lys side chain with (2-[2-(2-amino-ethoxy)-ethoxy]-acetyl)2-(gamma-Glu)-(10-(4-carbox yphenoxy)decanoyl)
  MISC_FEATURE (20)..(20): Xaa at position 20 is Aib
  MISC_FEATURE (24)..(24): Xaa at position 24 is D-Glu
  MISC_FEATURE (25)..(25): Xaa at position 25 is alpha-methyl-Tyr
  MOD_RES (28)..(28): Lys at position 28 is chemically modified by conjugation of the epsilon-amino group of the Lys side chain with (2-[2-(2-amino-ethoxy)-ethoxy]-acetyl)2-(gamma-Glu)-(10-(4-carbox yphenoxy)decanoyl)
  MOD_RES (39)..(39): Ser at position 39 is amidated

SEQ ID NO: 140 - protein, 39 aa, Artificial Sequence; identical to SEQ ID NO: 37
  Synthetic Construct
  MISC_FEATURE (2)..(2): Xaa at position 2 is Aib
  MISC_FEATURE (6)..(6): Xaa at position 6 is alpha-methyl-Phe(2F)
  MOD_RES (10)..(10): Lys at position 10 is chemically modified by conjugation of the epsilon-amino group of the Lys side chain with (2-[2-(2-amino-ethoxy)-ethoxy]-acetyl)2-(gamma-Glu)-(4-(4-tert-bu tylphenyl)butanoyl)
  MISC_FEATURE (13)..(13): Xaa at position 13 is alpha-methyl-Leu
  MISC_FEATURE (16)..(16): Xaa at position 16 is Orn
  MOD_RES (17)..(17): Lys at position 17 is chemically modified by conjugation of the epsilon-amino group of the Lys side chain with (2-[2-(2-amino-ethoxy)-ethoxy]-acetyl)2-(gamma-Glu)-(4-(4-tert-bu tylphenyl)butanoyl)
  MISC_FEATURE (20)..(20): Xaa at position 20 is Aib
  MISC_FEATURE (24)..(24): Xaa at position 24 is D-Glu
  MISC_FEATURE (25)..(25): Xaa at position 25 is alpha-methyl-Tyr
  MOD_RES (39)..(39): Ser at position 39 is amidated

SEQ ID NO: 141 - protein, 39 aa, Artificial Sequence; identical to SEQ ID NO: 25
  Synthetic Construct
  MISC_FEATURE (2)..(2): Xaa at position 2 is Aib
  MISC_FEATURE (6)..(6): Xaa at position 6 is alpha-methyl-Phe(2F)
  MISC_FEATURE (10)..(10): Xaa at position 10 is 4Pal
  MISC_FEATURE (13)..(13): Xaa at position 13 is alpha-methyl-Leu
  MISC_FEATURE (16)..(16): Xaa at position 16 is Orn
  MOD_RES (17)..(17): Lys at position 17 is chemically modified by conjugation of the epsilon-amino group of the Lys side chain with (2-[2-(2-amino-ethoxy)-ethoxy]-acetyl)2-(gamma-Glu)-(4-(4-tert-bu tylphenyl)butanoyl)
  MISC_FEATURE (20)..(20): Xaa at position 20 is Aib
  MOD_RES (21)..(21): Lys at position 21 is chemically modified by conjugation of the epsilon-amino group of the Lys side chain with (2-[2-(2-amino-ethoxy)-ethoxy]-acetyl)2-(gamma-Glu)-(4-(4-tert-bu tylphenyl)butanoyl)
  MISC_FEATURE (24)..(24): Xaa at position 24 is D-Glu
  MISC_FEATURE (25)..(25): Xaa at position 25 is alpha-methyl-Tyr
  MOD_RES (39)..(39): Ser at position 39 is amidated

SEQ ID NO: 142 - protein, 39 aa, Artificial Sequence; identical to SEQ ID NO: 26
  Synthetic Construct
  MISC_FEATURE (2)..(2): Xaa at position 2 is Aib
  MISC_FEATURE (6)..(6): Xaa at position 6 is alpha-methyl-Phe(2F)
  MISC_FEATURE (10)..(10): Xaa at position 10 is 4Pal
  MISC_FEATURE (13)..(13): Xaa at position 13 is alpha-methyl-Leu
  MISC_FEATURE (16)..(16): Xaa at position 16 is Orn
  MOD_RES (17)..(17): Lys at position 17 is chemically modified by conjugation of the epsilon-amino group of the Lys side chain with (2-[2-(2-amino-ethoxy)-ethoxy]-acetyl)2-(gamma-Glu)-(4-(4-tert-bu tylphenyl)butanoyl)
  MISC_FEATURE (20)..(20): Xaa at position 20 is Aib
  MOD_RES (24)..(24): Lys at position 24 is chemically modified by conjugation of the epsilon-amino group of the Lys side chain with (2-[2-(2-amino-ethoxy)-ethoxy]-acetyl)2-(gamma-Glu)-(4-(4-tert-bu tylphenyl)butanoyl)
  MISC_FEATURE (25)..(25): Xaa at position 25 is alpha-methyl-Tyr
  MOD_RES (39)..(39): Ser at position 39 is amidated

SEQ ID NO: 143 - protein, 39 aa, Artificial Sequence; identical to SEQ ID NO: 27
  Synthetic Construct
  MISC_FEATURE (2)..(2): Xaa at position 2 is Aib
  MISC_FEATURE (6)..(6): Xaa at position 6 is alpha-methyl-Phe(2F)
  MISC_FEATURE (10)..(10): Xaa at position 10 is 4Pal
  MISC_FEATURE (13)..(13): Xaa at position 13 is alpha-methyl-Leu
  MISC_FEATURE (16)..(16): Xaa at position 16 is Orn
  MOD_RES (17)..(17): Lys at position 17 is chemically modified by conjugation of the epsilon-amino group of the Lys side chain with (2-[2-(2-amino-ethoxy)-ethoxy]-acetyl)2-(gamma-Glu)-(4-(4-tert-bu tylphenyl)butanoyl)
  MISC_FEATURE (20)..(20): Xaa at position 20 is Aib
  MISC_FEATURE (24)..(24): Xaa at position 24 is D-Glu
  MISC_FEATURE (25)..(25): Xaa at position 25 is alpha-methyl-Tyr
  MOD_RES (28)..(28): Lys at position 28 is chemically modified by conjugation of the epsilon-amino group of the Lys side chain with (2-[2-(2-amino-ethoxy)-ethoxy]-acetyl)2-(gamma-Glu)-(4-(4-tert-bu tylphenyl)butanoyl)
  MOD_RES (39)..(39): Ser at position 39 is amidated

SEQ ID NO: 144 - protein, 39 aa, Artificial Sequence; identical to SEQ ID NO: 28
  Synthetic Construct
  MISC_FEATURE (2)..(2): Xaa at position 2 is Aib
  MISC_FEATURE (6)..(6): Xaa at position 6 is alpha-methyl-Phe(2F)
  MISC_FEATURE (10)..(10): Xaa at position 10 is 4Pal
  MISC_FEATURE (13)..(13): Xaa at position 13 is alpha-methyl-Leu
  MISC_FEATURE (16)..(16): Xaa at position 16 is Orn
  MOD_RES (17)..(17): Lys at position 17 is chemically modified by conjugation of the epsilon-amino group of the Lys side chain with (2-[2-(2-amino-ethoxy)-ethoxy]-acetyl)2-(gamma-Glu)-(4-(4-tert-bu tylphenyl)butanoyl)
  MISC_FEATURE (20)..(20): Xaa at position 20 is Aib
  MISC_FEATURE (24)..(24): Xaa at position 24 is D-Glu
  MISC_FEATURE (25)..(25): Xaa at position 25 is alpha-methyl-Tyr
  MOD_RES (30)..(30): Lys at position 30 is chemically modified by conjugation of the epsilon-amino group of the Lys side chain with (2-[2-(2-amino-ethoxy)-ethoxy]-acetyl)2-(gamma-Glu)-(4-(4-tert-bu tylphenyl)butanoyl)
  MOD_RES (39)..(39): Ser at position 39 is amidated

SEQ ID NO: 145 - protein, 40 aa, Artificial Sequence; identical to SEQ ID NO: 29
  Synthetic Construct
  MISC_FEATURE (2)..(2): Xaa at position 2 is Aib
  MISC_FEATURE (6)..(6): Xaa at position 6 is alpha-methyl-Phe(2F)
  MISC_FEATURE (10)..(10): Xaa at position 10 is 4Pal
  MISC_FEATURE (13)..(13): Xaa at position 13 is alpha-methyl-Leu
  MISC_FEATURE (16)..(16): Xaa at position 16 is Orn
  MOD_RES (17)..(17): Lys at position 17 is chemically modified by conjugation of the epsilon-amino group of the Lys side chain with (2-[2-(2-amino-ethoxy)-ethoxy]-acetyl)2-(gamma-Glu)-(4-(4-tert-bu tylphenyl)butanoyl)
  MISC_FEATURE (20)..(20): Xaa at position 20 is Aib
  MISC_FEATURE (24)..(24): Xaa at position 24 is D-Glu
  MISC_FEATURE (25)..(25): Xaa at position 25 is alpha-methyl-Tyr
  MOD_RES (40)..(40): Lys at position 40 is chemically modified by conjugation of the epsilon-amino group of the Lys side chain with (2-[2-(2-amino-ethoxy)-ethoxy]-acetyl)2-(gamma-Glu)-(4-(4-tert-bu tylphenyl)butanoyl)
  MOD_RES (40)..(40): Ser at position 40 is amidated

SEQ ID NO: 146 - protein, 39 aa, Artificial Sequence; identical to SEQ ID NO: 37
  Synthetic Construct
  MISC_FEATURE (2)..(2): Xaa at position 2 is Aib
  MISC_FEATURE (6)..(6): Xaa at position 6 is alpha-methyl-Phe(2F)
  MOD_RES (10)..(10): Lys at position 10 is chemically modified by conjugation of the epsilon-amino group of the Lys side chain with (2-[2-(2-amino-ethoxy)-ethoxy]-acetyl)2-(gamma-Glu)-CO-(CH2)10-CH 3
  MISC_FEATURE (13)..(13): Xaa at position 13 is alpha-methyl-Leu
  MISC_FEATURE (16)..(16): Xaa at position 16 is Orn
  MOD_RES (17)..(17): Lys at position 17 is chemically modified by conjugation of the epsilon-amino group of the Lys side chain with (2-[2-(2-amino-ethoxy)-ethoxy]-acetyl)2-(gamma-Glu)-CO-(CH2)10-CH 3
  MISC_FEATURE (20)..(20): Xaa at position 20 is Aib
  MISC_FEATURE (24)..(24): Xaa at position 24 is D-Glu
  MISC_FEATURE (25)..(25): Xaa at position 25 is alpha-methyl-Tyr
  MOD_RES (39)..(39): Ser at position 39 is amidated

SEQ ID NO: 147 - protein, 39 aa, Artificial Sequence; identical to SEQ ID NO: 25
  Synthetic Construct
  MISC_FEATURE (2)..(2): Xaa at position 2 is Aib
  MISC_FEATURE (6)..(6): Xaa at position 6 is alpha-methyl-Phe(2F)
  MISC_FEATURE (10)..(10): Xaa at position 10 is 4Pal
  MISC_FEATURE (13)..(13): Xaa at position 13 is alpha-methyl-Leu
  MISC_FEATURE (16)..(16): Xaa at position 16 is Orn
  MOD_RES (17)..(17): Lys at position 17 is chemically modified by conjugation of the epsilon-amino group of the Lys side chain with (2-[2-(2-amino-ethoxy)-ethoxy]-acetyl)2-(gamma-Glu)-CO-(CH2)10-CH 3
  MISC_FEATURE (20)..(20): Xaa at position 20 is Aib
  MOD_RES (21)..(21): Lys at position 21 is chemically modified by conjugation of the epsilon-amino group of the Lys side chain with (2-[2-(2-amino-ethoxy)-ethoxy]-acetyl)2-(gamma-Glu)-CO-(CH2)10-CH 3
  MISC_FEATURE (24)..(24): Xaa at position 24 is D-Glu
  MISC_FEATURE (25)..(25): Xaa at position 25 is alpha-methyl-Tyr
  MOD_RES (39)..(39): Ser at position 39 is amidated

SEQ ID NO: 148 - protein, 39 aa, Artificial Sequence; identical to SEQ ID NO: 26
  Synthetic Construct
  MISC_FEATURE (2)..(2): Xaa at position 2 is Aib
  MISC_FEATURE (6)..(6): Xaa at position 6 is alpha-methyl-Phe(2F)
  MISC_FEATURE (10)..(10): Xaa at position 10 is 4Pal
  MISC_FEATURE (13)..(13): Xaa at position 13 is alpha-methyl-Leu
  MISC_FEATURE (16)..(16): Xaa at position 16 is Orn
  MOD_RES (17)..(17): Lys at position 17 is chemically modified by conjugation of the epsilon-amino group of the Lys side chain with (2-[2-(2-amino-ethoxy)-ethoxy]-acetyl)2-(gamma-Glu)-CO-(CH2)10-CH 3
  MISC_FEATURE (20)..(20): Xaa at position 20 is Aib
  MOD_RES (24)..(24): Lys at position 24 is chemically modified by conjugation of the epsilon-amino group of the Lys side chain with (2-[2-(2-amino-ethoxy)-ethoxy]-acetyl)2-(gamma-Glu)-CO-(CH2)10-CH 3
  MISC_FEATURE (25)..(25): Xaa at position 25 is alpha-methyl-Tyr
  MOD_RES (39)..(39): Ser at position 39 is amidated

SEQ ID NO: 149 - protein, 39 aa, Artificial Sequence; identical to SEQ ID NO: 27
  Synthetic Construct
  MISC_FEATURE (2)..(2): Xaa at position 2 is Aib
  MISC_FEATURE (6)..(6): Xaa at position 6 is alpha-methyl-Phe(2F)
  MISC_FEATURE (10)..(10): Xaa at position 10 is 4Pal
  MISC_FEATURE (13)..(13): Xaa at position 13 is alpha-methyl-Leu
  MISC_FEATURE (16)..(16): Xaa at position 16 is Orn
  MOD_RES (17)..(17): Lys at position 17 is chemically modified by conjugation of the epsilon-amino group of the Lys side chain with (2-[2-(2-amino-ethoxy)-ethoxy]-acetyl)2-(gamma-Glu)-CO-(CH2)10-CH 3
  MISC_FEATURE (20)..(20): Xaa at position 20 is Aib
  MISC_FEATURE (24)..(24): Xaa at position 24 is D-Glu
  MISC_FEATURE (25)..(25): Xaa at position 25 is alpha-methyl-Tyr
  MOD_RES (28)..(28): Lys at position 28 is chemically modified by conjugation of the epsilon-amino group of the Lys side chain with (2-[2-(2-amino-ethoxy)-ethoxy]-acetyl)2-(gamma-Glu)-CO-(CH2)10-CH 3
  MOD_RES (39)..(39): Ser at position 39 is amidated

SEQ ID NO: 150 - protein, 39 aa, Artificial Sequence; identical to SEQ ID NO: 28
  Synthetic Construct
  MISC_FEATURE (2)..(2): Xaa at position 2 is Aib
  MISC_FEATURE (6)..(6): Xaa at position 6 is alpha-methyl-Phe(2F)
  MISC_FEATURE (10)..(10): Xaa at position 10 is 4Pal
  MISC_FEATURE (13)..(13): Xaa at position 13 is alpha-methyl-Leu
  MISC_FEATURE (16)..(16): Xaa at position 16 is Orn
  MOD_RES (17)..(17): Lys at position 17 is chemically modified by conjugation of the epsilon-amino group of the Lys side chain with (2-[2-(2-amino-ethoxy)-ethoxy]-acetyl)2-(gamma-Glu)-CO-(CH2)10-CH 3
  MISC_FEATURE (20)..(20): Xaa at position 20 is Aib
  MISC_FEATURE (24)..(24): Xaa at position 24 is D-Glu
  MISC_FEATURE (25)..(25): Xaa at position 25 is alpha-methyl-Tyr
  MOD_RES (30)..(30): Lys at position 30 is chemically modified by conjugation of the epsilon-amino group of the Lys side chain with (2-[2-(2-amino-ethoxy)-ethoxy]-acetyl)2-(gamma-Glu)-CO-(CH2)10-CH 3
  MOD_RES (39)..(39): Ser at position 39 is amidated

SEQ ID NO: 151 - protein, 40 aa, Artificial Sequence; identical to SEQ ID NO: 29
  Synthetic Construct
  MISC_FEATURE (2)..(2): Xaa at position 2 is Aib
  MISC_FEATURE (6)..(6): Xaa at position 6 is alpha-methyl-Phe(2F)
  MISC_FEATURE (10)..(10): Xaa at position 10 is 4Pal
  MISC_FEATURE (13)..(13): Xaa at position 13 is alpha-methyl-Leu
  MISC_FEATURE (16)..(16): Xaa at position 16 is Orn
  MOD_RES (17)..(17): Lys at position 17 is chemically modified by conjugation of the epsilon-amino group of the Lys side chain with (2-[2-(2-amino-ethoxy)-ethoxy]-acetyl)2-(gamma-Glu)-CO-(CH2)10-CH 3
  MISC_FEATURE (20)..(20): Xaa at position 20 is Aib
  MISC_FEATURE (24)..(24): Xaa at position 24 is D-Glu
  MISC_FEATURE (25)..(25): Xaa at position 25 is alpha-methyl-Tyr
  MOD_RES (40)..(40): Lys at position 40 is chemically modified by conjugation of the epsilon-amino group of the Lys side chain with (2-[2-(2-amino-ethoxy)-ethoxy]-acetyl)2-(gamma-Glu)-CO-(CH2)10-CH 3
  MOD_RES (40)..(40): Lys at position 40 is amidated

SEQ ID NO: 152 - protein, 39 aa, Artificial Sequence; identical to SEQ ID NO: 11
  Synthetic Construct
  MISC_FEATURE (2)..(2): Xaa at position 2 is Aib
  MISC_FEATURE (6)..(6): Xaa at position 6 is alpha-methyl-Phe(2F)
  MISC_FEATURE (10)..(10): Xaa at position 10 is Bzt
  MISC_FEATURE (13)..(13): Xaa at position 13 is alpha-methyl-Leu
  MISC_FEATURE (16)..(16): Xaa at position 16 is Orn
  MOD_RES (17)..(17): Lys at position 17 is chemically modified by conjugation of the epsilon-amino group of the Lys side chain with (2-[2-(2-amino-ethoxy)-ethoxy]-acetyl)2-(gamma-Glu)-CO-(CH2)12-CO 2H
  MISC_FEATURE (20)..(20): Xaa at position 20 is Aib
  MISC_FEATURE (24)..(24): Xaa at position 24 is D-Glu
  MISC_FEATURE (25)..(25): Xaa at position 25 is alpha-methyl-Tyr
  MOD_RES (31)..(31): Lys at position 31 is chemically modified by conjugation of the epsilon-amino group of the Lys side chain with (2-[2-(2-amino-ethoxy)-ethoxy]-acetyl)2-(gamma-Glu)-CO-(CH2)12-CO 2H
  MOD_RES (39)..(39): Ser at position 39 is amidated

SEQ ID NO: 153 - protein, 39 aa, Artificial Sequence; identical to SEQ ID NO: 11
  Synthetic Construct
  MISC_FEATURE (2)..(2): Xaa at position 2 is Aib
  MISC_FEATURE (6)..(6): Xaa at position 6 is alpha-methyl-Phe(2F)
  MISC_FEATURE (10)..(10): Xaa at position 10 is 2FA
  MISC_FEATURE (13)..(13): Xaa at position 13 is alpha-methyl-Leu
  MISC_FEATURE (16)..(16): Xaa at position 16 is Orn
  MOD_RES (17)..(17): Lys at position 17 is chemically modified by conjugation of the epsilon-amino group of the Lys side chain with (2-[2-(2-amino-ethoxy)-ethoxy]-acetyl)2-(gamma-Glu)-CO-(CH2)12-CO 2H
  MISC_FEATURE (20)..(20): Xaa at position 20 is Aib
  MISC_FEATURE (24)..(24): Xaa at position 24 is D-Glu
  MISC_FEATURE (25)..(25): Xaa at position 25 is alpha-methyl-Tyr
  MOD_RES (31)..(31): Lys at position 31 is chemically modified by conjugation of the epsilon-amino group of the Lys side chain with (2-[2-(2-amino-ethoxy)-ethoxy]-acetyl)2-(gamma-Glu)-CO-(CH2)12-CO 2H
  MOD_RES (39)..(39): Ser at position 39 is amidated

SEQ ID NO: 154 - protein, 39 aa, Artificial Sequence; identical to SEQ ID NO: 11
  Synthetic Construct
  MISC_FEATURE (2)..(2): Xaa at position 2 is Aib
  MISC_FEATURE (6)..(6): Xaa at position 6 is alpha-methyl-Phe(2F)
  MISC_FEATURE (10)..(10): Xaa at position 10 is 4TAA
  MISC_FEATURE (13)..(13): Xaa at position 13 is alpha-methyl-Leu
  MISC_FEATURE (16)..(16): Xaa at position 16 is Orn
  MOD_RES (17)..(17): Lys at position 17 is chemically modified by conjugation of the epsilon-amino group of the Lys side chain with (2-[2-(2-amino-ethoxy)-ethoxy]-acetyl)2-(gamma-Glu)-CO-(CH2)12-CO 2H
  MISC_FEATURE (20)..(20): Xaa at position 20 is Aib
  MISC_FEATURE (24)..(24): Xaa at position 24 is D-Glu
  MISC_FEATURE (25)..(25): Xaa at position 25 is alpha-methyl-Tyr
  MOD_RES (31)..(31): Lys at position 31 is chemically modified by conjugation of the epsilon-amino group of the Lys side chain with (2-[2-(2-amino-ethoxy)-ethoxy]-acetyl)2-(gamma-Glu)-CO-(CH2)12-CO 2H
  MOD_RES (39)..(39): Ser at position 39 is amidated

SEQ ID NO: 155 - protein, 39 aa, Artificial Sequence; identical to SEQ ID NO: 11
  Synthetic Construct
  MISC_FEATURE (2)..(2): Xaa at position 2 is Aib
  MISC_FEATURE (6)..(6): Xaa at position 6 is alpha-methyl-Phe(2F)
  MISC_FEATURE (10)..(10): Xaa at position 10 is 2TA
  MISC_FEATURE (13)..(13): Xaa at position 13 is alpha-methyl-Leu
  MISC_FEATURE (16)..(16): Xaa at position 16 is Orn
  MOD_RES (17)..(17): Lys at position 17 is chemically modified by conjugation of the epsilon-amino group of the Lys side chain with (2-[2-(2-amino-ethoxy)-ethoxy]-acetyl)2-(gamma-Glu)-CO-(CH2)12-CO 2H
  MISC_FEATURE (20)..(20): Xaa at position 20 is Aib
  MISC_FEATURE (24)..(24): Xaa at position 24 is D-Glu
  MISC_FEATURE (25)..(25): Xaa at position 25 is alpha-methyl-Tyr
  MOD_RES (31)..(31): Lys at position 31 is chemically modified by conjugation of the epsilon-amino group of the Lys side chain with (2-[2-(2-amino-ethoxy)-ethoxy]-acetyl)2-(gamma-Glu)-CO-(CH2)12-CO 2H
  MOD_RES (39)..(39): Ser at position 39 is amidated

SEQ ID NO: 156 - protein, 39 aa, Artificial Sequence; identical to SEQ ID NO: 11
  Synthetic Construct
  MISC_FEATURE (2)..(2): Xaa at position 2 is Aib
  MISC_FEATURE (6)..(6): Xaa at position 6 is alpha-methyl-Phe(2F)
  MISC_FEATURE (10)..(10): Xaa at position 10 is 3TA
  MISC_FEATURE (13)..(13): Xaa at position 13 is alpha-methyl-Leu
  MISC_FEATURE (16)..(16): Xaa at position 16 is Orn
  MOD_RES (17)..(17): Lys at position 17 is chemically modified by conjugation of the epsilon-amino group of the Lys side chain with (2-[2-(2-amino-ethoxy)-ethoxy]-acetyl)2-(gamma-Glu)-CO-(CH2)12-CO 2H
  MISC_FEATURE (20)..(20): Xaa at position 20 is Aib
  MISC_FEATURE (24)..(24): Xaa at position 24 is D-Glu
  MISC_FEATURE (25)..(25): Xaa at position 25 is alpha-methyl-Tyr
  MOD_RES (31)..(31): Lys at position 31 is chemically modified by conjugation of the epsilon-amino group of the Lys side chain with (2-[2-(2-amino-ethoxy)-ethoxy]-acetyl)2-(gamma-Glu)-CO-(CH2)12-CO 2H
  MOD_RES (39)..(39): Ser at position 39 is amidated

SEQ ID NO: 157 - protein, 39 aa, Artificial Sequence; identical to SEQ ID NO: 57
  Synthetic Construct
  MISC_FEATURE (2)..(2): Xaa at position 2 is Aib
  MISC_FEATURE (6)..(6): Xaa at position 6 is alpha-methyl-Phe(2F)
  MISC_FEATURE (10)..(10): Xaa at position 10 is 4Pal
  MISC_FEATURE (13)..(13): Xaa at position 13 is alpha-methyl-Leu
  MISC_FEATURE (16)..(16): Xaa at position 16 is Orn
  MOD_RES (17)..(17): Lys at position 17 is chemically modified by conjugation of the epsilon-amino group of the Lys side chain with (2-[2-(2-amino-ethoxy)-ethoxy]-acetyl)2-(gamma-Glu)-CO-(CH2)12-CO 2H
  MISC_FEATURE (20)..(20): Xaa at position 20 is Aib
  MISC_FEATURE (22)..(22): Xaa at position 22 is Bzt
  MISC_FEATURE (24)..(24): Xaa at position 24 is D-Glu
  MISC_FEATURE (25)..(25): Xaa at position 25 is alpha-methyl-Tyr
  MOD_RES (31)..(31): Lys at position 31 is chemically modified by conjugation of the epsilon-amino group of the Lys side chain with (2-[2-(2-amino-ethoxy)-ethoxy]-acetyl)2-(gamma-Glu)-CO-(CH2)12-CO 2H
  MOD_RES (39)..(39): Ser at position 39 is amidated

SEQ ID NO: 158 - protein, 39 aa, Artificial Sequence; identical to SEQ ID NO: 57
  Synthetic Construct
  MISC_FEATURE (2)..(2): Xaa at position 2 is Aib
  MISC_FEATURE (6)..(6): Xaa at position 6 is alpha-methyl-Phe(2F)
  MISC_FEATURE (10)..(10): Xaa at position 10 is 4Pal
  MISC_FEATURE (13)..(13): Xaa at position 13 is alpha-methyl-Leu
  MISC_FEATURE (16)..(16): Xaa at position 16 is Orn
  MOD_RES (17)..(17): Lys at position 17 is chemically modified by conjugation of the epsilon-amino group of the Lys side chain with (2-[2-(2-amino-ethoxy)-ethoxy]-acetyl)2-(gamma-Glu)-CO-(CH2)12-CO 2H
  MISC_FEATURE (20)..(20): Xaa at position 20 is Aib
  MISC_FEATURE (22)..(22): Xaa at position 22 is ChA
  MISC_FEATURE (24)..(24): Xaa at position 24 is D-Glu
  MISC_FEATURE (25)..(25): Xaa at position 25 is alpha-methyl-Tyr
  MOD_RES (31)..(31): Lys at position 31 is chemically modified by conjugation of the epsilon-amino group of the Lys side chain with (2-[2-(2-amino-ethoxy)-ethoxy]-acetyl)2-(gamma-Glu)-CO-(CH2)12-CO 2H
  MOD_RES (39)..(39): Ser at position 39 is amidated

SEQ ID NO: 159 - protein, 39 aa, Artificial Sequence; identical to SEQ ID NO: 11
  Synthetic Construct
  MISC_FEATURE (2)..(2): Xaa at position 2 is Aib
  MISC_FEATURE (6)..(6): Xaa at position 6 is alpha-methyl-Phe(2F)
  MISC_FEATURE (10)..(10): Xaa at position 10 is 4Pal
  MISC_FEATURE (13)..(13): Xaa at position 13 is alpha-methyl-Leu
  MISC_FEATURE (16)..(16): Xaa at position 16 is Orn
  MOD_RES (17)..(17): Lys at position 17 is chemically modified by conjugation of the epsilon-amino group of the Lys side chain with (2-[2-(2-amino-ethoxy)-ethoxy]-acetyl)2-(gamma-Glu)-CO-(CH2)12-CO 2H
  MISC_FEATURE (20)..(20): Xaa at position 20 is Orn
  MISC_FEATURE (24)..(24): Xaa at position 24 is D-Glu
  MISC_FEATURE (25)..(25): Xaa at position 25 is alpha-methyl-Tyr
  MOD_RES (31)..(31): Lys at position 31 is chemically modified by conjugation of the epsilon-amino group of the Lys side chain with (2-[2-(2-amino-ethoxy)-ethoxy]-acetyl)2-(gamma-Glu)-CO-(CH2)12-CO 2H
  MOD_RES (39)..(39): Ser at position 39 is amidated

SEQ ID NO: 160 - protein, 39 aa, Artificial Sequence
  Synthetic Construct
  MISC_FEATURE (2)..(2): Xaa at position 2 is Aib
  MISC_FEATURE (6)..(6): Xaa at position 6 is alpha-methyl-Phe(2F)
  MISC_FEATURE (10)..(10): Xaa at position 10 is 4Pal
  MISC_FEATURE (13)..(13): Xaa at position 13 is alpha-methyl-Leu
  MISC_FEATURE (16)..(16): Xaa at position 16 is Orn
  MOD_RES (17)..(17): Lys at position 17 is chemically modified by conjugation of the epsilon-amino group of the Lys side chain with (2-[2-(2-amino-ethoxy)-ethoxy]-acetyl)2-(gamma-Glu)-CO-(CH2)12-CO 2H
  MISC_FEATURE (20)..(20): Xaa at position 20 is Aib
  MISC_FEATURE (21)..(21): Xaa at position 21 is Orn
  MISC_FEATURE (24)..(24): Xaa at position 24 is D-Glu
  MISC_FEATURE (25)..(25): Xaa at position 25 is alpha-methyl-Tyr
  MOD_RES (31)..(31): Lys at position 31 is chemically modified by conjugation of the epsilon-amino group of the Lys side chain with (2-[2-(2-amino-ethoxy)-ethoxy]-acetyl)2-(gamma-Glu)-CO-(CH2)12-CO 2H
  MOD_RES (39)..(39): Ser at position 39 is amidated
YXEGTXTSDXSIXLDXKAQXXFIXXLIEGGKSSGAPPPS

SEQ ID NO: 161 - protein, 39 aa, Artificial Sequence
  Synthetic Construct
  MISC_FEATURE (2)..(2): Xaa at position 2 is Aib
  MISC_FEATURE (6)..(6): Xaa at position 6 is alpha-methyl-Phe(2F)
  MISC_FEATURE (10)..(10): Xaa at position 10 is 4Pal
  MISC_FEATURE (13)..(13): Xaa at position 13 is alpha-methyl-Leu
  MISC_FEATURE (16)..(16): Xaa at position 16 is Orn
  MOD_RES (17)..(17): Lys at position 17 is chemically modified by conjugation of the epsilon-amino group of the Lys side chain with (2-[2-(2-amino-ethoxy)-ethoxy]-acetyl)2-(gamma-Glu)-CO-(CH2)12-CO 2H
  MISC_FEATURE (20)..(20): Xaa at position 20 is Aib
  MISC_FEATURE (24)..(24): Xaa at position 24 is D-Glu
  MISC_FEATURE (25)..(25): Xaa at position 25 is alpha-methyl-Tyr
  MISC_FEATURE (28)..(28): Xaa at position 28 is Orn
  MOD_RES (31)..(31): Lys at position 31 is chemically modified by conjugation of the epsilon-amino group of the Lys side chain with (2-[2-(2-amino-ethoxy)-ethoxy]-acetyl)2-(gamma-Glu)-CO-(CH2)12-CO 2H
  MOD_RES (39)..(39): Ser at position 39 is amidated
YXEGTXTSDXSIXLDXKAQXEFIXXLIXGGKSSGAPPPS

SEQ ID NO: 162 - protein, 39 aa, Artificial Sequence
  Synthetic Construct
  MISC_FEATURE (2)..(2): Xaa at position 2 is Aib
  MISC_FEATURE (6)..(6): Xaa at position 6 is alpha-methyl-Phe(2F)
  MISC_FEATURE (10)..(10): Xaa at position 10 is 4Pal
  MISC_FEATURE (13)..(13): Xaa at position 13 is alpha-methyl-Leu
  MISC_FEATURE (16)..(16): Xaa at position 16 is Orn
  MOD_RES (17)..(17): Lys at position 17 is chemically modified by conjugation of the epsilon-amino group of the Lys side chain with (2-[2-(2-amino-ethoxy)-ethoxy]-acetyl)2-(gamma-Glu)-CO-(CH2)12-CO 2H
  MISC_FEATURE (20)..(20): Xaa at position 20 is Aib
  MISC_FEATURE (24)..(24): Xaa at position 24 is D-Glu
  MISC_FEATURE (25)..(25): Xaa at position 25 is alpha-methyl-Tyr
  MISC_FEATURE (30)..(30): Xaa at position 30 is Orn
  MOD_RES (31)..(31): Lys at position 31 is chemically modified by conjugation of the epsilon-amino group of the Lys side chain with (2-[2-(2-amino-ethoxy)-ethoxy]-acetyl)2-(gamma-Glu)-CO-(CH2)12-CO 2H
  MOD_RES (39)..(39): Ser at position 39 is amidated
YXEGTXTSDXSIXLDXKAQXEFIXXLIEGXKSSGAPPPS

SEQ ID NO: 163 - protein, 39 aa, Artificial Sequence
  Synthetic Construct
  MISC_FEATURE (2)..(2): Xaa at position 2 is Aib
  MISC_FEATURE (6)..(6): Xaa at position 6 is alpha-methyl-Phe(2F)
  MISC_FEATURE (10)..(10): Xaa at position 10 is 4Pal
  MISC_FEATURE (13)..(13): Xaa at position 13 is alpha-methyl-Leu
  MISC_FEATURE (16)..(16): Xaa at position 16 is Orn
  MOD_RES (17)..(17): Lys at position 17 is chemically modified by conjugation of the epsilon-amino group of the Lys side chain with (2-[2-(2-amino-ethoxy)-ethoxy]-acetyl)2-(gamma-Glu)-CO-(CH2)12-CO 2H
  MISC_FEATURE (20)..(20): Xaa at position 20 is Aib
  MISC_FEATURE (24)..(24): Xaa at position 24 is D-Glu
  MISC_FEATURE (25)..(25): Xaa at position 25 is alpha-methyl-Tyr
  MOD_RES (31)..(31): Lys at position 31 is chemically modified by conjugation of the epsilon-amino group of the Lys side chain with (2-[2-(2-amino-ethoxy)-ethoxy]-acetyl)2-(gamma-Glu)-CO-(CH2)12-CO 2H
  MISC_FEATURE (35)..(35): Xaa at position 35 is Orn
  MOD_RES (39)..(39): Ser at position 39 is amidated
YXEGTXTSDXSIXLDXKAQXEFIXXLIEGGKSSGXPPPS

SEQ ID NO: 164 - protein, 39 aa, Artificial Sequence
  Synthetic Construct
  MISC_FEATURE (2)..(2): Xaa at position 2 is Aib
  MISC_FEATURE (6)..(6): Xaa at position 6 is alpha-methyl-Phe(2F)
  MISC_FEATURE (10)..(10): Xaa at position 10 is 4Pal
  MISC_FEATURE (13)..(13): Xaa at position 13 is alpha-methyl-Leu
  MISC_FEATURE (16)..(16): Xaa at position 16 is Orn
  MOD_RES (17)..(17): Lys at position 17 is chemically modified by conjugation of the epsilon-amino group of the Lys side chain with (2-[2-(2-amino-ethoxy)-ethoxy]-acetyl)2-(gamma-Glu)-CO-(CH2)12-CO 2H
  MISC_FEATURE (20)..(20): Xaa at position 20 is Aib
  MISC_FEATURE (24)..(24): Xaa at position 24 is D-Glu
  MISC_FEATURE (25)..(25): Xaa at position 25 is alpha-methyl-Tyr
  MOD_RES (31)..(31): Lys at position 31 is chemically modified by conjugation of the epsilon-amino group of the Lys side chain with (2-[2-(2-amino-ethoxy)-ethoxy]-acetyl)2-(gamma-Glu)-CO-(CH2)12-CO 2H
  MISC_FEATURE (39)..(39): Xaa at position 39 is Orn
  MOD_RES (39)..(39): Orn at position 39 is amidated
YXEGTXTSDXSIXLDXKAQXEFIXXLIEGGKSSGAPPPX

SEQ ID NO: 165 - protein, 39 aa, Artificial Sequence
  Synthetic Construct
  MISC_FEATURE (2)..(2): Xaa at position 2 is Aib
  MISC_FEATURE (6)..(6): Xaa at position 6 is alpha-methyl-Phe(2F)
  MISC_FEATURE (10)..(10): Xaa at position 10 is 4Pal
  MISC_FEATURE (13)..(13): Xaa at position 13 is alpha-methyl-Leu
  MISC_FEATURE (16)..(16): Xaa at position 16 is Orn
  MOD_RES (17)..(17): Lys at position 17 is chemically modified by conjugation of the epsilon-amino group of the Lys side chain with (2-[2-(2-amino-ethoxy)-ethoxy]-acetyl)2-(gamma-Glu)-CO-(CH2)12-CO 2H
  MISC_FEATURE (20)..(20): Xaa at position 20 is Aib
  MISC_FEATURE (24)..(24): Xaa at position 24 is D-Glu
  MISC_FEATURE (25)..(25): Xaa at position 25 is alpha-methyl-Tyr
  MOD_RES (31)..(31): Lys at position 31 is chemically modified by conjugation of the epsilon-amino group of the Lys side chain with (2-[2-(2-amino-ethoxy)-ethoxy]-acetyl)2-(gamma-Glu)-CO-(CH2)12-CO 2H
  MISC_FEATURE (35)..(35): Xaa at position 35 is Orn
  MISC_FEATURE (39)..(39): Xaa at position 39 is Orn
  MOD_RES (39)..(39): Orn at position 39 is amidated
YXEGTXTSDXSIXLDXKAQXEFIXXLIEGGKSSGXPPPX

SEQ ID NO: 166 - protein, 39 aa, Artificial Sequence; identical to SEQ ID NO: 11
  Synthetic Construct
  MISC_FEATURE (2)..(2): Xaa at position 2 is Aib
  MISC_FEATURE (6)..(6): Xaa at position 6 is alpha-methyl-Phe(2F)
  MISC_FEATURE (10)..(10): Xaa at position 10 is 4Pal
  MISC_FEATURE (13)..(13): Xaa at position 13 is alpha-methyl-Leu
  MISC_FEATURE (16)..(16): Xaa at position 16 is Orn
  MOD_RES (17)..(17): Lys at position 17 is chemically modified by conjugation of the epsilon-amino group of the Lys side chain with (2-[2-(2-amino-ethoxy)-ethoxy]-acetyl)2-(gamma-Glu)-CO-(CH2)12-CO 2H
  MISC_FEATURE (20)..(20): Xaa at position 20 is 4Pal
  MISC_FEATURE (24)..(24): Xaa at position 24 is D-Glu
  MISC_FEATURE (25)..(25): Xaa at position 25 is alpha-methyl-Tyr
  MOD_RES (31)..(31): Lys at position 31 is chemically modified by conjugation of the epsilon-amino group of the Lys side chain with (2-[2-(2-amino-ethoxy)-ethoxy]-acetyl)2-(gamma-Glu)-CO-(CH2)12-CO 2H
  MOD_RES (39)..(39): Ser at position 39 is amidated

SEQ ID NO: 167 - protein, 39 aa, Artificial Sequence; identical to SEQ ID NO: 160
  Synthetic Construct
  MISC_FEATURE (2)..(2): Xaa at position 2 is Aib
  MISC_FEATURE (6)..(6): Xaa at position 6 is alpha-methyl-Phe(2F)
  MISC_FEATURE (10)..(10): Xaa at position 10 is 4Pal
  MISC_FEATURE (13)..(13): Xaa at position 13 is alpha-methyl-Leu
  MISC_FEATURE (16)..(16): Xaa at position 16 is Orn
  MOD_RES (17)..(17): Lys at position 17 is chemically modified by conjugation of the epsilon-amino group of the Lys side chain with (2-[2-(2-amino-ethoxy)-ethoxy]-acetyl)2-(gamma-Glu)-CO-(CH2)12-CO 2H
  MISC_FEATURE (20)..(20): Xaa at position 20 is Aib
  MISC_FEATURE (21)..(21): Xaa at position 21 is 4Pal
  MISC_FEATURE (24)..(24): Xaa at position 24 is D-Glu
  MISC_FEATURE (25)..(25): Xaa at position 25 is alpha-methyl-Tyr
  MOD_RES (31)..(31): Lys at position 31 is chemically modified by conjugation of the epsilon-amino group of the Lys side chain with (2-[2-(2-amino-ethoxy)-ethoxy]-acetyl)2-(gamma-Glu)-CO-(CH2)12-CO 2H
  MOD_RES (39)..(39): Ser at position 39 is amidated

SEQ ID NO: 168 - protein, 39 aa, Artificial Sequence
  Synthetic Construct
  MISC_FEATURE (2)..(2): Xaa at position 2 is Aib
  MISC_FEATURE (6)..(6): Xaa at position 6 is alpha-methyl-Phe(2F)
  MISC_FEATURE (10)..(10): Xaa at position 10 is 4Pal
  MISC_FEATURE (13)..(13): Xaa at position 13 is alpha-methyl-Leu
  MISC_FEATURE (16)..(16): Xaa at position 16 is Orn
  MOD_RES (17)..(17): Lys at position 17 is chemically modified by conjugation of the epsilon-amino group of the Lys side chain with (2-[2-(2-amino-ethoxy)-ethoxy]-acetyl)2-(gamma-Glu)-CO-(CH2)12-CO 2H
  MISC_FEATURE (20)..(20): Xaa at position 20 is Aib
  MISC_FEATURE (25)..(25): Xaa at position 25 is alpha-methyl-Tyr
  MOD_RES (31)..(31): Lys at position 31 is chemically modified by conjugation of the epsilon-amino group of the Lys side chain with (2-[2-(2-amino-ethoxy)-ethoxy]-acetyl)2-(gamma-Glu)-CO-(CH2)12-CO 2H
  MOD_RES (39)..(39): Ser at position 39 is amidated
YXEGTXTSDXSIXLDXKAQXEFIEXLIEGGKSSGAPPPS

SEQ ID NO: 169 - protein, 39 aa, Artificial Sequence; identical to SEQ ID NO: 168
  Synthetic Construct
  MISC_FEATURE (2)..(2): Xaa at position 2 is Aib
  MISC_FEATURE (6)..(6): Xaa at position 6 is alpha-methyl-Phe(2F)
  MISC_FEATURE (10)..(10): Xaa at position 10 is 4Pal
  MISC_FEATURE (13)..(13): Xaa at position 13 is alpha-methyl-Leu
  MISC_FEATURE (16)..(16): Xaa at position 16 is Orn
  MOD_RES (17)..(17): Lys at position 17 is chemically modified by conjugation of the epsilon-amino group of the Lys side chain with (2-[2-(2-amino-ethoxy)-ethoxy]-acetyl)2-(gamma-Glu)-CO-(CH2)12-CO 2H
  MISC_FEATURE (20)..(20): Xaa at position 20 is Aib
  MISC_FEATURE (25)..(25): Xaa at position 25 is alpha-methyl-Phe
  MOD_RES (31)..(31): Lys at position 31 is chemically modified by conjugation of the epsilon-amino group of the Lys side chain with (2-[2-(2-amino-ethoxy)-ethoxy]-acetyl)2-(gamma-Glu)-CO-(CH2)12-CO 2H
  MOD_RES (39)..(39): Ser at position 39 is amidated

SEQ ID NO: 170 - protein, 39 aa, Artificial Sequence; identical to SEQ ID NO: 26
  Synthetic Construct
  MISC_FEATURE (2)..(2): Xaa at position 2 is Aib
  MISC_FEATURE (6)..(6): Xaa at position 6 is alpha-methyl-Phe(2F)
  MISC_FEATURE (10)..(10): Xaa at position 10 is 4Pal
  MISC_FEATURE (13)..(13): Xaa at position 13 is alpha-methyl-Leu
  MISC_FEATURE (16)..(16): Xaa at position 16 is Orn
  MOD_RES (17)..(17): Lys at position 17 is chemically modified by conjugation of the epsilon-amino group of the Lys side chain with (2-[2-(2-amino-ethoxy)-ethoxy]-acetyl)2-(epsilon-Lys)-CO-(CH2)12- CO2H
  MISC_FEATURE (20)..(20): Xaa at position 20 is Aib
  MOD_RES (24)..(24): Lys at position 24 is chemically modified by conjugation of the epsilon-amino group of the Lys side chain with (2-[2-(2-amino-ethoxy)-ethoxy]-acetyl)2-(epsilon-Lys)-CO-(CH2)12- CO2H
  MISC_FEATURE (25)..(25): Xaa at position 25 is alpha-methyl-Tyr
  MOD_RES (39)..(39): Ser at position 39 is amidated

SEQ ID NO: 171 - protein, 39 aa, Artificial Sequence; identical to SEQ ID NO: 26
  Synthetic Construct
  MISC_FEATURE (2)..(2): Xaa at position 2 is Aib
  MISC_FEATURE (6)..(6): Xaa at position 6 is alpha-methyl-Phe(2F)
  MISC_FEATURE (10)..(10): Xaa at position 10 is 4Pal
  MISC_FEATURE (13)..(13): Xaa at position 13 is alpha-methyl-Leu
  MISC_FEATURE (16)..(16): Xaa at position 16 is Orn
  MOD_RES (17)..(17): Lys at position 17 is chemically modified by conjugation of the epsilon-amino group of the Lys side chain with (epsilon-Lys)-(gamma-Glu)-CO-(CH2)12-CO2H
  MISC_FEATURE (20)..(20): Xaa at position 20 is Aib
  MOD_RES (24)..(24): Lys at position 24 is chemically modified by conjugation of the epsilon-amino group of the Lys side chain with (epsilon-Lys)-(gamma-Glu)-CO-(CH2)12-CO2H
  MISC_FEATURE (25)..(25): Xaa at position 25 is alpha-methyl-Tyr
  MOD_RES (39)..(39): Ser at position 39 is amidated

SEQ ID NO: 172 - protein, 39 aa, Artificial Sequence; identical to SEQ ID NO: 26
  Synthetic Construct
  MISC_FEATURE (2)..(2): Xaa at position 2 is Aib
  MISC_FEATURE (6)..(6): Xaa at position 6 is alpha-methyl-Phe(2F)
  MISC_FEATURE (10)..(10): Xaa at position 10 is 4Pal
  MISC_FEATURE (13)..(13): Xaa at position 13 is alpha-methyl-Leu
  MISC_FEATURE (16)..(16): Xaa at position 16 is Orn
  MOD_RES (17)..(17): Lys at position 17 is chemically modified by conjugation of the epsilon-amino group of the Lys side chain with (epsilon-Lys)-(epsilon-Lys)-(gamma-Glu)-CO-(CH2)12-CO2H
  MISC_FEATURE (20)..(20): Xaa at position 20 is Aib
  MOD_RES (24)..(24): Lys at position 24 is chemically modified by conjugation of the epsilon-amino group of the Lys side chain with (epsilon-Lys)-(epsilon-Lys)-(gamma-Glu)-CO-(CH2)12-CO2H
  MISC_FEATURE (25)..(25): Xaa at position 25 is alpha-methyl-Tyr
  MOD_RES (39)..(39): Ser at position 39 is amidated

SEQ ID NO: 173 - protein, 39 aa, Artificial Sequence; identical to SEQ ID NO: 101
  Synthetic Construct
  MISC_FEATURE (2)..(2): Xaa at position 2 is Aib
  MISC_FEATURE (6)..(6): Xaa at position 6 is alpha-methyl-Phe(2F)
  MISC_FEATURE (11)..(11): Xaa at position 11 is Aib
  MISC_FEATURE (13)..(13): Xaa at position 13 is alpha-methyl-Leu
  MISC_FEATURE (16)..(16): Xaa at position 16 is Orn
  MOD_RES (17)..(17): Lys at position 17 is chemically modified by conjugation of the epsilon-amino group of the Lys side chain with (2-[2-(2-amino-ethoxy)-ethoxy]-acetyl)2-(epsilon-Lys)-CO-(CH2)12- CO2H
  MISC_FEATURE (20)..(20): Xaa at position 20 is Aib
  MISC_FEATURE (24)..(24): Xaa at position 24 is D-Glu
  MISC_FEATURE (25)..(25): Xaa at position 25 is alpha-methyl-Tyr
  MOD_RES (31)..(31): Lys at position 31 is chemically modified by conjugation of the epsilon-amino group of the Lys side chain with (2-[2-(2-amino-ethoxy)-ethoxy]-acetyl)2-(epsilon-Lys)-CO-(CH2)12- CO2H
  MOD_RES (39)..(39): Ser at position 39 is amidated

SEQ ID NO: 174 - protein, 39 aa, Artificial Sequence; identical to SEQ ID NO: 101
  Synthetic Construct
  MISC_FEATURE (2)..(2): Xaa at position 2 is Aib
  MISC_FEATURE (6)..(6): Xaa at position 6 is alpha-methyl-Phe(2F)
  MISC_FEATURE (11)..(11): Xaa at position 11 is Aib
  MISC_FEATURE (13)..(13): Xaa at position 13 is alpha-methyl-Leu
  MISC_FEATURE (16)..(16): Xaa at position 16 is Orn
  MOD_RES (17)..(17): Lys at position 17 is chemically modified by conjugation of the epsilon-amino group of the Lys side chain with (epsilon-Lys)-(gamma-Glu)-CO-(CH2)12-CO2H
  MISC_FEATURE (20)..(20): Xaa at position 20 is Aib
  MISC_FEATURE (24)..(24): Xaa at position 24 is D-Glu
  MISC_FEATURE (25)..(25): Xaa at position 25 is alpha-methyl-Tyr
  MOD_RES (31)..(31): Lys at position 31 is chemically modified by conjugation of the epsilon-amino group of the Lys side chain with (epsilon-Lys)-(gamma-Glu)-CO-(CH2)12-CO2H
  MOD_RES (39)..(39): Ser at position 39 is amidated

SEQ ID NO: 175 - protein, 39 aa, Artificial Sequence; identical to SEQ ID NO: 101
  Synthetic Construct
  MISC_FEATURE (2)..(2): Xaa at position 2 is Aib
  MISC_FEATURE (6)..(6): Xaa at position 6 is alpha-methyl-Phe(2F)
  MISC_FEATURE (11)..(11): Xaa at position 11 is Aib
  MISC_FEATURE (13)..(13): Xaa at position 13 is alpha-methyl-Leu
  MISC_FEATURE (16)..(16): Xaa at position 16 is Orn
  MOD_RES (17)..(17): Lys at position 17 is chemically modified by conjugation of the epsilon-amino group of the Lys side chain with (epsilon-Lys)-(epsilon-Lys)-(gamma-Glu)-CO-(CH2)12-CO2H
  MISC_FEATURE (20)..(20): Xaa at position 20 is Aib
  MISC_FEATURE (24)..(24): Xaa at position 24 is D-Glu
  MISC_FEATURE (25)..(25): Xaa at position 25 is alpha-methyl-Tyr
  MOD_RES (31)..(31): Lys at position 31 is chemically modified by conjugation of the epsilon-amino group of the Lys side chain with (epsilon-Lys)-(epsilon-Lys)-(gamma-Glu)-CO-(CH2)12-CO2H
  MOD_RES (39)..(39): Ser at position 39 is amidated

SEQ ID NO: 176 - protein, 39 aa, Artificial Sequence; identical to SEQ ID NO: 125
  Synthetic Construct
  MISC_FEATURE (2)..(2): Xaa at position 2 is Aib
  MISC_FEATURE (6)..(6): Xaa at position 6 is alpha-methyl-Phe(2F)
  MISC_FEATURE (11)..(11): Xaa at position 11 is Aib
  MISC_FEATURE (13)..(13): Xaa at position 13 is alpha-methyl-Leu
  MISC_FEATURE (16)..(16): Xaa at position 16 is Orn
  MOD_RES (17)..(17): Lys at position 17 is chemically modified by conjugation of the epsilon-amino group of the Lys side chain with (2-[2-(2-amino-ethoxy)-ethoxy]-acetyl)2-(epsilon-Lys)-CO-(CH2)12- CO2H
  MISC_FEATURE (20)..(20): Xaa at position 20 is Aib
  MOD_RES (24)..(24): Lys at position 24 is chemically modified by conjugation of the epsilon-amino group of the Lys side chain with (2-[2-(2-amino-ethoxy)-ethoxy]-acetyl)2-(epsilon-Lys)-CO-(CH2)12- CO2H
  MISC_FEATURE (25)..(25): Xaa at position 25 is alpha-methyl-Tyr
  MOD_RES (39)..(39): Ser at position 39 is amidated

SEQ ID NO: 177 - protein, 39 aa, Artificial Sequence; identical to SEQ ID NO: 125
  Synthetic Construct
  MISC_FEATURE (2)..(2): Xaa at position 2 is Aib
  MISC_FEATURE (6)..(6): Xaa at position 6 is alpha-methyl-Phe(2F)
  MISC_FEATURE (11)..(11): Xaa at position 11 is Aib
  MISC_FEATURE (13)..(13): Xaa at position 13 is alpha-methyl-Leu
  MISC_FEATURE (16)..(16): Xaa at position 16 is Orn
  MOD_RES (17)..(17): Lys at position 17 is chemically modified by conjugation of the epsilon-amino group of the Lys side chain with (epsilon-Lys)-(gamma-Glu)-CO-(CH2)12-CO2H
  MISC_FEATURE (20)..(20): Xaa at position 20 is Aib
  MOD_RES (24)..(24): Lys at position 24 is chemically modified by conjugation of the epsilon-amino group of the Lys side chain with (epsilon-Lys)-(gamma-Glu)-CO-(CH2)12-CO2H
  MISC_FEATURE (25)..(25): Xaa at position 25 is alpha-methyl-Tyr
  MOD_RES (39)..(39): Ser at position 39 is amidated

SEQ ID NO: 178 - protein, 39 aa, Artificial Sequence; identical to SEQ ID NO: 125
  Synthetic Construct
  MISC_FEATURE (2)..(2): Xaa at position 2 is Aib
  MISC_FEATURE (6)..(6): Xaa at position 6 is alpha-methyl-Phe(2F)
  MISC_FEATURE (11)..(11): Xaa at position 11 is Aib
  MISC_FEATURE (13)..(13): Xaa at position 13 is alpha-methyl-Leu
  MISC_FEATURE (16)..(16): Xaa at position 16 is Orn
  MOD_RES (17)..(17): Lys at position 17 is chemically modified by conjugation of the epsilon-amino group of the Lys side chain with (epsilon-Lys)-(epsilon-Lys)-(gamma-Glu)-CO-(CH2)12-CO2H
  MISC_FEATURE (20)..(20): Xaa at position 20 is Aib
  MOD_RES (24)..(24): Lys at position 24 is chemically modified by conjugation of the epsilon-amino group of the Lys side chain with (epsilon-Lys)-(epsilon-Lys)-(gamma-Glu)-CO-(CH2)12-CO2H
  MISC_FEATURE (25)..(25): Xaa at position 25 is alpha-methyl-Tyr
  MOD_RES (39)..(39): Ser at position 39 is amidated

SEQ ID NO: 179 - protein, 39 aa, Artificial Sequence; identical to SEQ ID NO: 11
  Synthetic Construct
  MISC_FEATURE (2)..(2): Xaa at position 2 is Aib
  MISC_FEATURE (6)..(6): Xaa at position 6 is alpha-methyl-Phe(2F)
  MISC_FEATURE (10)..(10): Xaa at position 10 is 4Pal
  MISC_FEATURE (13)..(13): Xaa at position 13 is alpha-methyl-Leu
  MISC_FEATURE (16)..(16): Xaa at position 16 is Orn
  MOD_RES (17)..(17): Lys at position 17 is chemically modified by conjugation of the epsilon-amino group of the Lys side chain with (2-[2-(2-amino-ethoxy)-ethoxy]-acetyl)2-(gamma-Glu)-CO-(CH2)12-CO 2H
  MISC_FEATURE (20)..(20): Xaa at position 20 is alpha-methyl-Phe
  MISC_FEATURE (24)..(24): Xaa at position 24 is D-Glu
  MISC_FEATURE (25)..(25): Xaa at position 25 is alpha-methyl-Tyr
  MOD_RES (31)..(31): Lys at position 31 is chemically modified by conjugation of the epsilon-amino group of the Lys side chain with (2-[2-(2-amino-ethoxy)-ethoxy]-acetyl)2-(gamma-Glu)-CO-(CH2)12-CO 2H
  MOD_RES (39)..(39): Ser at position 39 is amidated

SEQ ID NO: 180 - protein, 39 aa, Artificial Sequence; identical to SEQ ID NO: 11
  Synthetic Construct
  MISC_FEATURE (2)..(2): Xaa at position 2 is Aib
  MISC_FEATURE (6)..(6): Xaa at position 6 is alpha-methyl-Phe(2F)
  MISC_FEATURE (10)..(10): Xaa at position 10 is 4Pal
  MISC_FEATURE (13)..(13): Xaa at position 13 is alpha-methyl-Leu
  MISC_FEATURE (16)..(16): Xaa at position 16 is Orn
  MOD_RES (17)..(17): Lys at position 17 is chemically modified by conjugation of the epsilon-amino group of the Lys side chain with (2-[2-(2-amino-ethoxy)-ethoxy]-acetyl)2-(gamma-Glu)-CO-(CH2)12-CO 2H
  MISC_FEATURE (20)..(20): Xaa at position 20 is Ac5c
  MISC_FEATURE (24)..(24): Xaa at position 24 is D-Glu
  MISC_FEATURE (25)..(25): Xaa at position 25 is alpha-methyl-Tyr
  MOD_RES (31)..(31): Lys at position 31 is chemically modified by conjugation of the epsilon-amino group of the Lys side chain with (2-[2-(2-amino-ethoxy)-ethoxy]-acetyl)2-(gamma-Glu)-CO-(CH2)12-CO 2H
  MOD_RES (39)..(39): Ser at position 39 is amidated

SEQ ID NO: 181 - protein, 39 aa, Artificial Sequence; identical to SEQ ID NO: 11
  Synthetic Construct
  MISC_FEATURE (2)..(2): Xaa at position 2 is Aib
  MISC_FEATURE (6)..(6): Xaa at position 6 is alpha-methyl-Phe(2F)
  MISC_FEATURE (10)..(10): Xaa at position 10 is 4Pal
  MISC_FEATURE (13)..(13): Xaa at position 13 is alpha-methyl-Leu
  MISC_FEATURE (16)..(16): Xaa at position 16 is Orn
  MOD_RES (17)..(17): Lys at position 17 is chemically modified by conjugation of the epsilon-amino group of the Lys side chain with (2-[2-(2-amino-ethoxy)-ethoxy]-acetyl)2-(gamma-Glu)-CO-(CH2)12-CO 2H
  MISC_FEATURE (20)..(20): Xaa at position 20 is Ac6c
  MISC_FEATURE (24)..(24): Xaa at position 24 is D-Glu
  MISC_FEATURE (25)..(25): Xaa at position 25 is alpha-methyl-Tyr
  MOD_RES (31)..(31): Lys at position 31 is chemically modified by conjugation of the epsilon-amino group of the Lys side chain with (2-[2-(2-amino-ethoxy)-ethoxy]-acetyl)2-(gamma-Glu)-CO-(CH2)12-CO 2H
  MOD_RES (39)..(39): Ser at position 39 is amidated

SEQ ID NO: 182 - protein, 39 aa, Artificial Sequence; identical to SEQ ID NO: 11
  Synthetic Construct
  MISC_FEATURE (2)..(2): Xaa at position 2 is Aib
  MISC_FEATURE (6)..(6): Xaa at position 6 is alpha-methyl-Phe
  MISC_FEATURE (10)..(10): Xaa at position 10 is 4Pal
  MISC_FEATURE (13)..(13): Xaa at position 13 is alpha-methyl-Leu
  MISC_FEATURE (16)..(16): Xaa at position 16 is Orn
  MOD_RES (17)..(17): Lys at position 17 is chemically modified by conjugation of the epsilon-amino group of the Lys side chain with (2-[2-(2-amino-ethoxy)-ethoxy]-acetyl)2-(gamma-Glu)-CO-(CH2)10-CH 3
  MISC_FEATURE (20)..(20): Xaa at position 20 is Aib
  MISC_FEATURE (24)..(24): Xaa at position 24 is D-Glu
  MISC_FEATURE (25)..(25): Xaa at position 25 is alpha-methyl-Tyr
  MOD_RES (31)..(31): Lys at position 31 is chemically modified by conjugation of the epsilon-amino group of the Lys side chain with (2-[2-(2-amino-ethoxy)-ethoxy]-acetyl)2-(gamma-Glu)-CO-(CH2)10-CH 3
  MOD_RES (39)..(39): Ser at position 39 is amidated

SEQ ID NO: 183 - protein, 39 aa, Artificial Sequence; identical to SEQ ID NO: 57
  Synthetic Construct
  MISC_FEATURE (2)..(2): Xaa at position 2 is Aib
  MISC_FEATURE (6)..(6): Xaa at position 6 is alpha-methyl-Phe
  MISC_FEATURE (10)..(10): Xaa at position 10 is 4Pal
  MISC_FEATURE (13)..(13): Xaa at position 13 is alpha-methyl-Leu
  MISC_FEATURE (16)..(16): Xaa at position 16 is Orn
  MOD_RES (17)..(17): Lys at position 17 is chemically modified by conjugation of the epsilon-amino group of the Lys side chain with (2-[2-(2-amino-ethoxy)-ethoxy]-acetyl)2-(gamma-Glu)-CO-(CH2)10-CH 3
  MISC_FEATURE (20)..(20): Xaa at position 20 is Aib
  MISC_FEATURE (22)..(22): Xaa at position 22 is alpha-methyl-Phe
  MISC_FEATURE (24)..(24): Xaa at position 24 is D-Glu
  MISC_FEATURE (25)..(25): Xaa at position 25 is alpha-methyl-Tyr
  MOD_RES (31)..(31): Lys at position 31 is chemically modified by conjugation of the epsilon-amino group of the Lys side chain with (2-[2-(2-amino-ethoxy)-ethoxy]-acetyl)2-(gamma-Glu)-CO-(CH2)10-CH 3
  MOD_RES (39)..(39): Ser at position 39 is amidated

SEQ ID NO: 184 - protein, 39 aa, Artificial Sequence; identical to SEQ ID NO: 57
  Synthetic Construct
  MISC_FEATURE (2)..(2): Xaa at position 2 is Aib
  MISC_FEATURE (6)..(6): Xaa at position 6 is alpha-methyl-Phe
  MISC_FEATURE (10)..(10): Xaa at position 10 is 4Pal
  MISC_FEATURE (13)..(13): Xaa at position 13 is alpha-methyl-Leu
  MISC_FEATURE (16)..(16): Xaa at position 16 is Orn
  MOD_RES (17)..(17): Lys at position 17 is chemically modified by conjugation of the epsilon-amino group of the Lys side chain with (2-[2-(2-amino-ethoxy)-ethoxy]-acetyl)2-(gamma-Glu)-CO-(CH2)10-CH 3
  MISC_FEATURE (20)..(20): Xaa at position 20 is Aib
  MISC_FEATURE (22)..(22): Xaa at position 22 is alpha-methyl-Phe
  MISC_FEATURE (24)..(24): Xaa at position 24 is D-Glu
  MISC_FEATURE (25)..(25): Xaa at position 25 is alpha-methyl-Phe
  MOD_RES (31)..(31): Lys at position 31 is chemically modified by conjugation of the epsilon-amino group of the Lys side chain with (2-[2-(2-amino-ethoxy)-ethoxy]-acetyl)2-(gamma-Glu)-CO-(CH2)10-CH 3
  MOD_RES (39)..(39): Ser at position 39 is amidated

SEQ ID NO: 185 - protein, 39 aa, Artificial Sequence; identical to SEQ ID NO: 101
  Synthetic Construct
  MISC_FEATURE (2)..(2): Xaa at position 2 is Aib
  MISC_FEATURE (6)..(6): Xaa at position 6 is alpha-methyl-Phe(2F)
  MISC_FEATURE (11)..(11): Xaa at position 11 is Aib
  MISC_FEATURE (13)..(13): Xaa at position 13 is alpha-methyl-Leu
  MISC_FEATURE (16)..(16): Xaa at position 16 is Orn
  MOD_RES (17)..(17): Lys at position 17 is chemically modified by conjugation of the epsilon-amino group of the Lys side chain with (2-[2-(2-amino-ethoxy)-ethoxy]-acetyl)2-(gamma-Glu)-CO-(CH2)10-CH 3
  MISC_FEATURE (20)..(20): Xaa at position 20 is Aib
  MISC_FEATURE (24)..(24): Xaa at position 24 is D-Glu
  MISC_FEATURE (25)..(25): Xaa at position 25 is alpha-methyl-Tyr
  MOD_RES (31)..(31): Lys at position 31 is chemically modified by conjugation of the epsilon-amino group of the Lys side chain with (2-[2-(2-amino-ethoxy)-ethoxy]-acetyl)2-(gamma-Glu)-CO-(CH2)10-CH 3
  MOD_RES (39)..(39): Ser at position 39 is amidated

SEQ ID NO: 186 - protein, 39 aa, Artificial Sequence; identical to SEQ ID NO: 101
  Synthetic Construct
  MISC_FEATURE (2)..(2): Xaa at position 2 is Aib
  MISC_FEATURE (6)..(6): Xaa at position 6 is alpha-methyl-Phe
  MISC_FEATURE (11)..(11): Xaa at position 11 is Aib
  MISC_FEATURE (13)..(13): Xaa at position 13 is alpha-methyl-Leu
  MISC_FEATURE (16)..(16): Xaa at position 16 is Orn
  MOD_RES (17)..(17): Lys at position 17 is chemically modified by conjugation of the epsilon-amino group of the Lys side chain with (2-[2-(2-amino-ethoxy)-ethoxy]-acetyl)2-(gamma-Glu)-CO-(CH2)10-CH 3
  MISC_FEATURE (20)..(20): Xaa at position 20 is Aib
  MISC_FEATURE (24)..(24): Xaa at position 24 is D-Glu
  MISC_FEATURE (25)..(25): Xaa at position 25 is alpha-methyl-Tyr
  MOD_RES (31)..(31): Lys at position 31 is chemically modified by conjugation of the epsilon-amino group of the Lys side chain with (2-[2-(2-amino-ethoxy)-ethoxy]-acetyl)2-(gamma-Glu)-CO-(CH2)10-CH 3
  MOD_RES (39)..(39): Ser at position 39 is amidated

SEQ ID NO: 187 - protein, 39 aa, Artificial Sequence; identical to SEQ ID NO: 101
  Synthetic Construct
  MISC_FEATURE (2)..(2): Xaa at position 2 is Aib
  MISC_FEATURE (6)..(6): Xaa at position 6 is alpha-methyl-Phe(2F)
  MISC_FEATURE (11)..(11): Xaa at position 11 is Aib
  MISC_FEATURE (13)..(13): Xaa at position 13 is alpha-methyl-Leu
  MISC_FEATURE (16)..(16): Xaa at position 16 is Orn
  MOD_RES (17)..(17): Lys at position 17 is chemically modified by conjugation of the epsilon-amino group of the Lys side chain with (2-[2-(2-Amino-ethoxy)-ethoxy]-acetyl)2-(gamma-Glu)-(4-(4-tert-bu tylphenyl)butanoyl)
  MISC_FEATURE (20)..(20): Xaa at position 20 is Aib
  MISC_FEATURE (24)..(24): Xaa at position 24 is D-Glu
  MISC_FEATURE (25)..(25): Xaa at position 25 is alpha-methyl-Tyr
  MOD_RES (31)..(31): Lys at position 31 is chemically modified by conjugation of the epsilon-amino group of the Lys side chain with (2-[2-(2-Amino-ethoxy)-ethoxy]-acetyl)2-(gamma-Glu)-(4-(4-tert-bu tylphenyl)butanoyl)
  MOD_RES (39)..(39): Ser at position 39 is amidated

SEQ ID NO: 188 - protein, 39 aa, Artificial Sequence; identical to SEQ ID NO: 101
  Synthetic Construct
  MISC_FEATURE (2)..(2): Xaa at position 2 is Aib
  MISC_FEATURE (6)..(6): Xaa at position 6 is alpha-methyl-Phe
  MISC_FEATURE (11)..(11): Xaa at position 11 is Aib
  MISC_FEATURE (13)..(13): Xaa at position 13 is alpha-methyl-Leu
  MISC_FEATURE (16)..(16): Xaa at position 16 is Orn
  MOD_RES (17)..(17): Lys at position 17 is chemically modified by conjugation of the epsilon-amino group of the Lys side chain with (2-[2-(2-amino-ethoxy)-ethoxy]-acetyl)2-(gamma-Glu)-(4-(4-tert-bu tylphenyl)butanoyl)
  MISC_FEATURE (20)..(20): Xaa at position 20 is Aib
  MISC_FEATURE (24)..(24): Xaa at position 24 is D-Glu
  MISC_FEATURE (25)..(25): Xaa at position 25 is alpha-methyl-Tyr
  MOD_RES (31)..(31): Lys at position 31 is chemically modified by conjugation of the epsilon-amino group of the Lys side chain with (2-[2-(2-amino-ethoxy)-ethoxy]-acetyl)2-(gamma-Glu)-(4-(4-tert-bu tylphenyl)butanoyl)
  MOD_RES (39)..(39): Ser at position 39 is amidated

SEQ ID NO: 189 - protein, 39 aa, Artificial Sequence; identical to SEQ ID NO: 100
  Synthetic Construct
  MISC_FEATURE (2)..(2): Xaa at position 2 is Aib
  MISC_FEATURE (6)..(6): Xaa at position 6 is alpha-methyl-Phe
  MISC_FEATURE (13)..(13): Xaa at position 13 is alpha-methyl-Leu
  MISC_FEATURE (16)..(16): Xaa at position 16 is Orn
  MOD_RES (17)..(17): Lys at position 17 is chemically modified by conjugation of the epsilon-amino group of the Lys side chain with (2-[2-(2-amino-ethoxy)-ethoxy]-acetyl)2-(gamma-Glu)-CO-(CH2)12-CO 2H
  MISC_FEATURE (20)..(20): Xaa at position 20 is Aib
  MISC_FEATURE (24)..(24): Xaa at position 24 is D-Glu
  MISC_FEATURE (25)..(25): Xaa at position 25 is alpha-methyl-Tyr
  MOD_RES (31)..(31): Lys at position 31 is chemically modified by conjugation of the epsilon-amino group of the Lys side chain with (2-[2-(2-amino-ethoxy)-ethoxy]-acetyl)2-(gamma-Glu)-CO-(CH2)12-CO 2H
  MOD_RES (39)..(39): Ser at position 39 is amidated

SEQ ID NO: 190 - protein, 39 aa, Artificial Sequence; identical to SEQ ID NO: 101
  Synthetic Construct
  MISC_FEATURE (2)..(2): Xaa at position 2 is Aib
  MISC_FEATURE (6)..(6): Xaa at position 6 is alpha-methyl-Phe
  MISC_FEATURE (11)..(11): Xaa at position 11 is Aib
  MISC_FEATURE (13)..(13): Xaa at position 13 is alpha-methyl-Leu
  MISC_FEATURE (16)..(16): Xaa at position 16 is Orn
  MOD_RES (17)..(17): Lys at position 17 is chemically modified by conjugation of the epsilon-amino group of the Lys side chain with (2-[2-(2-amino-ethoxy)-ethoxy]-acetyl)2-(gamma-Glu)-CO-(CH2)12-CO 2H
  MISC_FEATURE (20)..(20): Xaa at position 20 is Aib
  MISC_FEATURE (24)..(24): Xaa at position 24 is D-Glu
  MISC_FEATURE (25)..(25): Xaa at position 25 is alpha-methyl-Tyr
  MOD_RES (31)..(31): Lys at position 31 is chemically modified by conjugation of the epsilon-amino group of the Lys side chain with (2-[2-(2-amino-ethoxy)-ethoxy]-acetyl)2-(gamma-Glu)-CO-(CH2)12-CO 2H
  MOD_RES (39)..(39): Ser at position 39 is amidated

SEQ ID NO: 191 - protein, 39 aa, Artificial Sequence; identical to SEQ ID NO: 124
  Synthetic Construct
  MISC_FEATURE (2)..(2): Xaa at position 2 is Aib
  MISC_FEATURE (6)..(6): Xaa at position 6 is alpha-methyl-Phe
  MISC_FEATURE (13)..(13): Xaa at position 13 is alpha-methyl-Leu
  MISC_FEATURE (16)..(16): Xaa at position 16 is Orn
  MOD_RES (17)..(17): Lys at position 17 is chemically modified by conjugation of the epsilon-amino group of the Lys side chain with (2-[2-(2-amino-ethoxy)-ethoxy]-acetyl)2-(gamma-Glu)-CO-(CH2)12-CO 2H
  MISC_FEATURE (20)..(20): Xaa at position 20 is Aib
  MOD_RES (24)..(24): Lys at position 24 is chemically modified by conjugation of the epsilon-amino group of the Lys side chain with (2-[2-(2-amino-ethoxy)-ethoxy]-acetyl)2-(gamma-Glu)-CO-(CH2)12-CO 2H
  MISC_FEATURE (25)..(25): Xaa at position 25 is alpha-methyl-Tyr
  MOD_RES (39)..(39): Ser at position 39 is amidated

SEQ ID NO: 192 - protein, 39 aa, Artificial Sequence
  Synthetic Construct
  MISC_FEATURE (2)..(2): Xaa at position 2 is Aib
  MISC_FEATURE (6)..(6): Xaa at position 6 is alpha-methyl-Phe
  MISC_FEATURE (11)..(11): Xaa at position 11 is Aib
  MISC_FEATURE (13)..(13): Xaa at position 13 is alpha-methyl-Leu
  MISC_FEATURE (16)..(16): Xaa at position 16 is Orn
  MOD_RES (17)..(17): Lys at position 17 is chemically modified by conjugation of the epsilon-amino group of the Lys side chain with (2-[2-(2-amino-ethoxy)-ethoxy]-acetyl)2-(gamma-Glu)-CO-(CH2)12-CO 2H
  MISC_FEATURE (20)..(20): Xaa at position 20 is Aib
  MOD_RES (24)..(24): Lys at position 24 is chemically modified by conjugation of the epsilon-amino group of the Lys side chain with (2-[2-(2-amino-ethoxy)-ethoxy]-acetyl)2-(gamma-Glu)-CO-(CH2)12-CO 2H
  MISC_FEATURE (25)..(25): Xaa at position 25 is alpha-methyl-Tyr
  MOD_RES (39)..(39): Ser at position 39 is amidated
YXEGTXTSDVXIXLDXKAQXEFIKXLIEGGKSSGAPPPS

SEQ ID NO: 193 - protein, 34 aa, Artificial Sequence
  Synthetic Construct
  MISC_FEATURE (2)..(2): Xaa at position 2 is Aib
  MISC_FEATURE (6)..(6): Xaa at position 6 is alpha-methyl-Phe(2F)
  MISC_FEATURE (10)..(10): Xaa at position 10 is 4Pal
  MISC_FEATURE (13)..(13): Xaa at position 13 is alpha-methyl-Leu
  MISC_FEATURE (16)..(16): Xaa at position 16 is Orn
  MOD_RES (17)..(17): Lys at position 17 is chemically modified by conjugation of the epsilon-amino group of the Lys side chain with (2-[2-(2-amino-ethoxy)-ethoxy]-acetyl)2-(gamma-Glu)-CO-(CH2)12-CO 2H
  MISC_FEATURE (20)..(20): Xaa at position 20 is Aib
  MISC_FEATURE (24)..(24): Xaa at position 24 is D-Glu
  MISC_FEATURE (25)..(25): Xaa at position 25 is alpha-methyl-Tyr
  MOD_RES (31)..(31): Lys at position 31 is chemically modified by conjugation of the epsilon-amino group of the Lys side chain with (2-[2-(2-amino-ethoxy)-ethoxy]-acetyl)2-(gamma-Glu)-CO-(CH2)12-CO 2H
  MOD_RES (34)..(34): Gly at position 34 is amidated
YXEGTXTSDXSIXLDXKAQXEFIXXLIEGGKSSG

SEQ ID NO: 194 - protein, 31 aa, Artificial Sequence
  Synthetic Construct
  MISC_FEATURE (2)..(2): Xaa at position 2 is Aib
  MISC_FEATURE (6)..(6): Xaa at position 6 is alpha-methyl-Phe(2F)
  MISC_FEATURE (10)..(10): Xaa at position 10 is 4Pal
  MISC_FEATURE (13)..(13): Xaa at position 13 is alpha-methyl-Leu
  MISC_FEATURE (16)..(16): Xaa at position 16 is Orn
  MOD_RES (17)..(17): Lys at position 17 is chemically modified by conjugation of the epsilon-amino group of the Lys side chain with (2-[2-(2-amino-ethoxy)-ethoxy]-acetyl)2-(gamma-Glu)-CO-(CH2)12-CO 2H
  MISC_FEATURE (20)..(20): Xaa at position 20 is Aib
  MISC_FEATURE (24)..(24): Xaa at position 24 is D-Glu
  MISC_FEATURE (25)..(25): Xaa at position 25 is alpha-methyl-Tyr
  MOD_RES (31)..(31): Lys at position 31 is chemically modified by conjugation of the epsilon-amino group of the Lys side chain with (2-[2-(2-amino-ethoxy)-ethoxy]-acetyl)2-(gamma-Glu)-CO-(CH2)12-CO 2H
  MOD_RES (31)..(31): Lys at position 31 is amidated
YXEGTXTSDXSIXLDXKAQXEFIXXLIEGGK

SEQ ID NO: 195 - protein, 31 aa, Artificial Sequence; identical to SEQ ID NO: 194
  Synthetic Construct
  MISC_FEATURE (2)..(2): Xaa at position 2 is Aib
  MISC_FEATURE (6)..(6): Xaa at position 6 is alpha-methyl-Phe(2F)
  MISC_FEATURE (10)..(10): Xaa at position 10 is 4Pal
  MISC_FEATURE (13)..(13): Xaa at position 13 is alpha-methyl-Leu
  MISC_FEATURE (16)..(16): Xaa at position 16 is Orn
  MOD_RES (17)..(17): Lys at position 17 is chemically modified by conjugation of the epsilon-amino group of the Lys side chain with (2-[2-(2-amino-ethoxy)-ethoxy]-acetyl)2-(epsilon-Lys)-CO-(CH2)12- CO2H
  MISC_FEATURE (20)..(20): Xaa at position 20 is Aib
  MISC_FEATURE (24)..(24): Xaa at position 24 is D-Glu
  MISC_FEATURE (25)..(25): Xaa at position 25 is alpha-methyl-Tyr
  MOD_RES (31)..(31): Lys at position 31 is chemically modified by conjugation of the epsilon-amino group of the Lys side chain with (2-[2-(2-amino-ethoxy)-ethoxy]-acetyl)2-(epsilon-Lys)-CO-(CH2)12- CO2H
  MOD_RES (31)..(31): Lys at position 31 is amidated

SEQ ID NO: 196 - protein, 31 aa, Artificial Sequence; identical to SEQ ID NO: 194
  Synthetic Construct
  MISC_FEATURE (2)..(2): Xaa at position 2 is Aib
  MISC_FEATURE (6)..(6): Xaa at position 6 is alpha-methyl-Phe(2F)
  MISC_FEATURE (10)..(10): Xaa at position 10 is 4Pal
  MISC_FEATURE (13)..(13): Xaa at position 13 is alpha-methyl-Leu
  MISC_FEATURE (16)..(16): Xaa at position 16 is Orn
  MOD_RES (17)..(17): Lys at position 17 is chemically modified by conjugation of the epsilon-amino group of the Lys side chain with (epsilon-Lys)-(gamma-Glu)-CO-(CH2)12-CO2H
  MISC_FEATURE (20)..(20): Xaa at position 20 is Aib
  MISC_FEATURE (24)..(24): Xaa at position 24 is D-Glu
  MISC_FEATURE (25)..(25): Xaa at position 25 is alpha-methyl-Tyr
  MOD_RES (31)..(31): Lys at position 31 is chemically modified by conjugation of the epsilon-amino group of the Lys side chain with (epsilon-Lys)-(gamma-Glu)-CO-(CH2)12-CO2H
  MOD_RES (31)..(31): Lys at position 31 is amidated

SEQ ID NO: 197 - protein, 31 aa, Artificial Sequence; identical to SEQ ID NO: 194
  Synthetic Construct
  MISC_FEATURE (2)..(2): Xaa at position 2 is Aib
  MISC_FEATURE (6)..(6): Xaa at position 6 is alpha-methyl-Phe(2F)
  MISC_FEATURE (10)..(10): Xaa at position 10 is 4Pal
  MISC_FEATURE (13)..(13): Xaa at position 13 is alpha-methyl-Leu
  MISC_FEATURE (16)..(16): Xaa at position 16 is Orn
  MOD_RES (17)..(17): Lys at position 17 is chemically modified by conjugation of the epsilon-amino group of the Lys side chain with (epsilon-Lys)-(epsilon-Lys)-(gamma-Glu)-CO-(CH2)12-CO2H
  MISC_FEATURE (20)..(20): Xaa at position 20 is Aib
  MISC_FEATURE (24)..(24): Xaa at position 24 is D-Glu
  MISC_FEATURE (25)..(25): Xaa at position 25 is alpha-methyl-Tyr
  MOD_RES (31)..(31): Lys at position 31 is chemically modified by conjugation of the epsilon-amino group of the Lys side chain with (epsilon-Lys)-(epsilon-Lys)-(gamma-Glu)-CO-(CH2)12-CO2H
  MOD_RES (31)..(31): Lys at position 31 is amidated

SEQ ID NO: 198 - protein, 34 aa, Artificial Sequence
  Synthetic Construct
  MISC_FEATURE (2)..(2): Xaa at position 2 is Aib
  MISC_FEATURE (6)..(6): Xaa at position 6 is alpha-methyl-Phe(2F)
  MISC_FEATURE (10)..(10): Xaa at position 10 is 4Pal
  MISC_FEATURE (13)..(13): Xaa at position 13 is alpha-methyl-Leu
  MISC_FEATURE (16)..(16): Xaa at position 16 is Orn
  MOD_RES (17)..(17): Lys at position 17 is chemically modified by conjugation of the epsilon-amino group of the Lys side chain with (2-[2-(2-amino-ethoxy)-ethoxy]-acetyl)2-(gamma-Glu)-CO-(CH2)12-CO 2H
  MISC_FEATURE (20)..(20): Xaa at position 20 is Aib
  MOD_RES (24)..(24): Lys at position 24 is chemically modified by conjugation of the epsilon-amino group of the Lys side chain with (2-[2-(2-amino-ethoxy)-ethoxy]-acetyl)2-(gamma-Glu)-CO-(CH2)12-CO 2H
  MISC_FEATURE (25)..(25): Xaa at position 25 is alpha-methyl-Tyr
  MOD_RES (34)..(34): Gly at position 34 is amidated
YXEGTXTSDXSIXLDXKAQXEFIKXLIEGGPSSG

SEQ ID NO: 199 - protein, 30 aa, Artificial Sequence
  Synthetic Construct
  MISC_FEATURE (2)..(2): Xaa at position 2 is Aib
  MISC_FEATURE (6)..(6): Xaa at position 6 is alpha-methyl-Phe(2F)
  MISC_FEATURE (10)..(10): Xaa at position 10 is 4Pal
  MISC_FEATURE (13)..(13): Xaa at position 13 is alpha-methyl-Leu
  MISC_FEATURE (16)..(16): Xaa at position 16 is Orn
  MOD_RES (17)..(17): Lys at position 17 is chemically modified by conjugation of the epsilon-amino group of the Lys side chain with (2-[2-(2-amino-ethoxy)-ethoxy]-acetyl)2-(gamma-Glu)-CO-(CH2)12-CO 2H
  MISC_FEATURE (20)..(20): Xaa at position 20 is Aib
  MOD_RES (24)..(24): Lys at position 24 is chemically modified by conjugation of the epsilon-amino group of the Lys side chain with (2-[2-(2-amino-ethoxy)-ethoxy]-acetyl)2-(gamma-Glu)-CO-(CH2)12-CO 2H
  MISC_FEATURE (25)..(25): Xaa at position 25 is alpha-methyl-Tyr
  MOD_RES (30)..(30): Gly at position 30 is amidated
YXEGTXTSDXSIXLDXKAQXEFIKXLIEGG

SEQ ID NO: 200 - protein, 30 aa, Artificial Sequence
  Synthetic Construct
  MISC_FEATURE (2)..(2): Xaa at position 2 is Aib
  MISC_FEATURE (6)..(6): Xaa at position 6 is alpha-methyl-Phe(2F)
  MISC_FEATURE (10)..(10): Xaa at position 10 is 4Pal
  MISC_FEATURE (13)..(13): Xaa at position 13 is alpha-methyl-Leu
  MISC_FEATURE (16)..(16): Xaa at position 16 is Orn
  MOD_RES (17)..(17): Lys at position 17 is chemically modified by conjugation of the epsilon-amino group of the Lys side chain with (2-[2-(2-amino-ethoxy)-ethoxy]-acetyl)2-(gamma-Glu)-CO-(CH2)12-CO 2H
  MISC_FEATURE (20)..(20): Xaa at position 20 is Aib
  MOD_RES (24)..(24): Lys at position 24 is chemically modified by conjugation of the epsilon-amino group of the Lys side chain with (2-[2-(2-amino-ethoxy)-ethoxy]-acetyl)2-(gamma-Glu)-CO-(CH2)12-CO 2H
  MISC_FEATURE (25)..(25): Xaa at position 25 is alpha-methyl-Tyr
  MISC_FEATURE (30)..(30): Xaa at position 30 is Orn
  MOD_RES (30)..(30): Orn at position 30 is amidated
YXEGTXTSDXSIXLDXKAQXEFIKXLIEGX

SEQ ID NO: 201 - protein, 39 aa, Artificial Sequence; identical to SEQ ID NO: 79
  Synthetic Construct
  MISC_FEATURE (2)..(2): Xaa at position 2 is Aib
  MISC_FEATURE (6)..(6): Xaa at position 6 is alpha-methyl-Phe(2F)
  MISC_FEATURE (10)..(10): Xaa at position 10 is 4Pal
  MISC_FEATURE (13)..(13): Xaa at position 13 is alpha-methyl-Leu
  MISC_FEATURE (16)..(16): Xaa at position 16 is Orn
  MISC_FEATURE (20)..(20): Xaa at position 20 is Aib
  MOD_RES (21)..(21): Lys at position 21 is chemically modified by conjugation of the epsilon-amino group of the Lys side chain with (2-[2-(2-amino-ethoxy)-ethoxy]-acetyl)2-CO-(CH2)12-CO2H
  MOD_RES (24)..(24): Lys at position 24 is chemically modified by conjugation of the epsilon-amino group of the Lys side chain with (2-[2-(2-amino-ethoxy)-ethoxy]-acetyl)2-CO-(CH2)12-CO2H
  MISC_FEATURE (25)..(25): Xaa at position 25 is alpha-methyl-Tyr
  MOD_RES (39)..(39): Ser at position 39 is amidated

SEQ ID NO: 202 - protein, 39 aa, Artificial Sequence; identical to SEQ ID NO: 80
  Synthetic Construct
  MISC_FEATURE (2)..(2): Xaa at position 2 is Aib
  MISC_FEATURE (6)..(6): Xaa at position 6 is alpha-methyl-Phe(2F)
  MISC_FEATURE (10)..(10): Xaa at position 10 is 4Pal
  MISC_FEATURE (13)..(13): Xaa at position 13 is alpha-methyl-Leu
  MISC_FEATURE (16)..(16): Xaa at position 16 is Orn
  MISC_FEATURE (20)..(20): Xaa at position 20 is Aib
  MOD_RES (24)..(24): Lys at position 24 is chemically modified by conjugation of the epsilon-amino group of the Lys side chain with (2-[2-(2-amino-ethoxy)-ethoxy]-acetyl)2-CO-(CH2)12-CO2H
  MISC_FEATURE (25)..(25): Xaa at position 25 is alpha-methyl-Tyr
  MOD_RES (28)..(28): Lys at position 28 is chemically modified by conjugation of the epsilon-amino group of the Lys side chain with (2-[2-(2-amino-ethoxy)-ethoxy]-acetyl)2-CO-(CH2)12-CO2H
  MOD_RES (39)..(39): Ser at position 39 is amidated

SEQ ID NO: 203 - protein, 39 aa, Artificial Sequence; identical to SEQ ID NO: 81
  Synthetic Construct
  MISC_FEATURE (2)..(2): Xaa at position 2 is Aib
  MISC_FEATURE (6)..(6): Xaa at position 6 is alpha-methyl-Phe(2F)
  MISC_FEATURE (10)..(10): Xaa at position 10 is 4Pal
  MISC_FEATURE (13)..(13): Xaa at position 13 is alpha-methyl-Leu
  MISC_FEATURE (16)..(16): Xaa at position 16 is Orn
  MISC_FEATURE (20)..(20): Xaa at position 20 is Aib
  MOD_RES (24)..(24): Lys at position 24 is chemically modified by conjugation of the epsilon-amino group of the Lys side chain with (2-[2-(2-amino-ethoxy)-ethoxy]-acetyl)2-CO-(CH2)12-CO2H
  MISC_FEATURE (25)..(25): Xaa at position 25 is alpha-methyl-Tyr
  MOD_RES (31)..(31): Lys at position 31 is chemically modified by conjugation of the epsilon-amino group of the Lys side chain with (2-[2-(2-amino-ethoxy)-ethoxy]-acetyl)2-CO-(CH2)12-CO2H
  MOD_RES (39)..(39): Ser at position 39 is amidated

SEQ ID NO: 204 - protein, 40 aa, Artificial Sequence; identical to SEQ ID NO: 82
  Synthetic Construct
  MISC_FEATURE (2)..(2): Xaa at position 2 is Aib
  MISC_FEATURE (6)..(6): Xaa at position 6 is alpha-methyl-Phe(2F)
  MISC_FEATURE (10)..(10): Xaa at position 10 is 4Pal
  MISC_FEATURE (13)..(13): Xaa at position 13 is alpha-methyl-Leu
  MISC_FEATURE (16)..(16): Xaa at position 16 is Orn
  MISC_FEATURE (20)..(20): Xaa at position 20 is Aib
  MOD_RES (24)..(24): Lys at position 24 is chemically modified by conjugation of the epsilon-amino group of the Lys side chain with (2-[2-(2-amino-ethoxy)-ethoxy]-acetyl)2-CO-(CH2)12-CO2H
  MISC_FEATURE (25)..(25): Xaa at position 25 is alpha-methyl-Tyr
  MOD_RES (40)..(40): Lys at position 40 is chemically modified by conjugation of the epsilon-amino group of the Lys side chain with (2-[2-(2-amino-ethoxy)-ethoxy]-acetyl)2-CO-(CH2)12-CO2H
  MOD_RES (40)..(40): Lys at position 40 is amidated

SEQ ID NO: 205 - protein, 39 aa, Artificial Sequence; identical to SEQ ID NO: 84
  Synthetic Construct
  MISC_FEATURE (2)..(2): Xaa at position 2 is Aib
  MISC_FEATURE (6)..(6): Xaa at position 6 is alpha-methyl-Phe(2F)
  MISC_FEATURE (10)..(10): Xaa at position 10 is 4Pal
  MISC_FEATURE (13)..(13): Xaa at position 13 is alpha-methyl-Leu
  MISC_FEATURE (16)..(16): Xaa at position 16 is Orn
  MISC_FEATURE (20)..(20): Xaa at position 20 is Aib
  MOD_RES (21)..(21): Lys at position 21 is chemically modified by conjugation of the epsilon-amino group of the Lys side chain with (2-[2-(2-amino-ethoxy)-ethoxy]-acetyl)2-CO-(CH2)12-CO2H
  MISC_FEATURE (24)..(24): Xaa at position 24 is D-Glu
  MISC_FEATURE (25)..(25): Xaa at position 25 is alpha-methyl-Tyr
  MOD_RES (31)..(31): Lys at position 31 is chemically modified by conjugation of the epsilon-amino group of the Lys side chain with (2-[2-(2-amino-ethoxy)-ethoxy]-acetyl)2-CO-(CH2)12-CO2H
  MOD_RES (39)..(39): Ser at position 39 is amidated

SEQ ID NO: 206 - protein, 40 aa, Artificial Sequence; identical to SEQ ID NO: 85
  Synthetic Construct
  MISC_FEATURE (2)..(2): Xaa at position 2 is Aib
  MISC_FEATURE (6)..(6): Xaa at position 6 is alpha-methyl-Phe(2F)
  MISC_FEATURE (10)..(10): Xaa at position 10 is 4Pal
  MISC_FEATURE (13)..(13): Xaa at position 13 is alpha-methyl-Leu
  MISC_FEATURE (16)..(16): Xaa at position 16 is Orn
  MISC_FEATURE (20)..(20): Xaa at position 20 is Aib
  MOD_RES (21)..(21): Lys at position 21 is chemically modified by conjugation of the epsilon-amino group of the Lys side chain with (2-[2-(2-amino-ethoxy)-ethoxy]-acetyl)2-CO-(CH2)12-CO2H
  MISC_FEATURE (24)..(24): Xaa at position 24 is D-Glu
  MISC_FEATURE (25)..(25): Xaa at position 25 is alpha-methyl-Tyr
  MOD_RES (40)..(40): Lys at position 40 is chemically modified by conjugation of the epsilon-amino group of the Lys side chain with (2-[2-(2-amino-ethoxy)-ethoxy]-acetyl)2-CO-(CH2)12-CO2H
  MOD_RES (40)..(40): Lys at position 40 is amidated

SEQ ID NO: 207 - protein, 39 aa, Artificial Sequence; identical to SEQ ID NO: 81
  Synthetic Construct
  MISC_FEATURE (2)..(2): Xaa at position 2 is Aib
  MISC_FEATURE (6)..(6): Xaa at position 6 is alpha-methyl-Phe(2F)
  MISC_FEATURE (10)..(10): Xaa at position 10 is 4Pal
  MISC_FEATURE (13)..(13): Xaa at position 13 is alpha-methyl-Leu
  MISC_FEATURE (16)..(16): Xaa at position 16 is Orn
  MISC_FEATURE (20)..(20): Xaa at position 20 is Aib
  MOD_RES (24)..(24): Lys at position 24 is chemically modified by conjugation of the epsilon-amino group of the Lys side chain with (epsilon-Lys)-(gamma-Glu)-CO-(CH2)12-CO2H
  MISC_FEATURE (25)..(25): Xaa at position 25 is alpha-methyl-Tyr
  MOD_RES (31)..(31): Lys at position 31 is chemically modified by conjugation of the epsilon-amino group of the Lys side chain with (epsilon-Lys)-(gamma-Glu)-CO-(CH2)12-CO2H
  MOD_RES (39)..(39): Ser at position 39 is amidated

SEQ ID NO: 208 - protein, 39 aa, Artificial Sequence; identical to SEQ ID NO: 81
  Synthetic Construct
  MISC_FEATURE (2)..(2): Xaa at position 2 is Aib
  MISC_FEATURE (6)..(6): Xaa at position 6 is alpha-methyl-Phe(2F)
  MISC_FEATURE (10)..(10): Xaa at position 10 is 4Pal
  MISC_FEATURE (13)..(13): Xaa at position 13 is alpha-methyl-Leu
  MISC_FEATURE (16)..(16): Xaa at position 16 is Orn
  MISC_FEATURE (20)..(20): Xaa at position 20 is Aib
  MOD_RES (24)..(24): Lys at position 24 is chemically modified by conjugation of the epsilon-amino group of the Lys side chain with (epsilon-Lys)-(epsilon-Lys)-(gamma-Glu)-CO-(CH2)12-CO2H
  MISC_FEATURE (25)..(25): Xaa at position 25 is alpha-methyl-Tyr
  MOD_RES (31)..(31): Lys at position 31 is chemically modified by conjugation of the epsilon-amino group of the Lys side chain with (epsilon-Lys)-(epsilon-Lys)-(gamma-Glu)-CO-(CH2)12-CO2H
  MOD_RES (39)..(39): Ser at position 39 is amidated

SEQ ID NO: 209 - protein, 39 aa, Artificial Sequence; identical to SEQ ID NO: 99
  Synthetic Construct
  MISC_FEATURE (2)..(2): Xaa at position 2 is Aib
  MISC_FEATURE (6)..(6): Xaa at position 6 is alpha-methyl-Phe(2F)
  MISC_FEATURE (10)..(10): Xaa at position 10 is 4Pal
  MISC_FEATURE (11)..(11): Xaa at position 11 is Dap
  MISC_FEATURE (13)..(13): Xaa at position 13 is alpha-methyl-Leu
  MISC_FEATURE (16)..(16): Xaa at position 16 is Orn
  MOD_RES (17)..(17): Lys at position 17 is chemically modified by conjugation of the epsilon-amino group of the Lys side chain with (2-[2-(2-amino-ethoxy)-ethoxy]-acetyl)2-(gamma-Glu)-CO-(CH2)12-CO 2H
  MISC_FEATURE (20)..(20): Xaa at position 20 is Aib
  MISC_FEATURE (24)..(24): Xaa at position 24 is D-Glu
  MISC_FEATURE (25)..(25): Xaa at position 25 is alpha-methyl-Tyr
  MOD_RES (31)..(31): Lys at position 31 is chemically modified by conjugation of the epsilon-amino group of the Lys side chain with (2-[2-(2-amino-ethoxy)-ethoxy]-acetyl)2-(gamma-Glu)-CO-(CH2)12-CO 2H
  MOD_RES (39)..(39): Ser at position 39 is amidated

SEQ ID NO: 210 - protein, 39 aa, Artificial Sequence; identical to SEQ ID NO: 59
  Synthetic Construct
  MISC_FEATURE (2)..(2): Xaa at position 2 is Aib
  MISC_FEATURE (6)..(6): Xaa at position 6 is alpha-methyl-Phe(2F)
  MISC_FEATURE (11)..(11): Xaa at position 11 is Dap
  MISC_FEATURE (13)..(13): Xaa at position 13 is alpha-methyl-Leu
  MISC_FEATURE (16)..(16): Xaa at position 16 is Orn
  MOD_RES (17)..(17): Lys at position 17 is chemically modified by conjugation of the epsilon-amino group of the Lys side chain with (2-[2-(2-amino-ethoxy)-ethoxy]-acetyl)2-(gamma-Glu)-CO-(CH2)12-CO 2H
  MISC_FEATURE (20)..(20): Xaa at position 20 is Aib
  MISC_FEATURE (24)..(24): Xaa at position 24 is D-Glu
  MISC_FEATURE (25)..(25): Xaa at position 25 is alpha-methyl-Tyr
  MOD_RES (31)..(31): Lys at position 31 is chemically modified by conjugation of the epsilon-amino group of the Lys side chain with (2-[2-(2-amino-ethoxy)-ethoxy]-acetyl)2-(gamma-Glu)-CO-(CH2)12-CO 2H
  MOD_RES (39)..(39): Ser at position 39 is amidated

SEQ ID NO: 211 - protein, 39 aa, Artificial Sequence; identical to SEQ ID NO: 101
  Synthetic Construct
  MISC_FEATURE (2)..(2): Xaa at position 2 is Aib
  MISC_FEATURE (6)..(6): Xaa at position 6 is alpha-methyl-Phe(2F)
  MISC_FEATURE (11)..(11): Xaa at position 11 is Dap
  MISC_FEATURE (13)..(13): Xaa at position 13 is alpha-methyl-Leu
  MISC_FEATURE (16)..(16): Xaa at position 16 is Orn
  MOD_RES (17)..(17): Lys at position 17 is chemically modified by conjugation of the epsilon-amino group of the Lys side chain with (2-[2-(2-amino-ethoxy)-ethoxy]-acetyl)2-(gamma-Glu)-CO-(CH2)12-CO 2H
  MISC_FEATURE (20)..(20): Xaa at position 20 is Aib
  MISC_FEATURE (24)..(24): Xaa at position 24 is D-Glu
  MISC_FEATURE (25)..(25): Xaa at position 25 is alpha-methyl-Tyr
  MOD_RES (31)..(31): Lys at position 31 is chemically modified by conjugation of the epsilon-amino group of the Lys side chain with (2-[2-(2-amino-ethoxy)-ethoxy]-acetyl)2-(gamma-Glu)-CO-(CH2)12-CO 2H
  MOD_RES (39)..(39): Ser at position 39 is amidated

SEQ ID NO: 212 - protein, 39 aa, Artificial Sequence; identical to SEQ ID NO: 99
  Synthetic Construct
  MISC_FEATURE (2)..(2): Xaa at position 2 is Aib
  MISC_FEATURE (6)..(6): Xaa at position 6 is alpha-methyl-Phe(2F)
  MISC_FEATURE (10)..(10): Xaa at position 10 is 4Pal
  MISC_FEATURE (11)..(11): Xaa at position 11 is Tle
  MISC_FEATURE (13)..(13): Xaa at position 13 is alpha-methyl-Leu
  MISC_FEATURE (16)..(16): Xaa at position 16 is Orn
  MOD_RES (17)..(17): Lys at position 17 is chemically modified by conjugation of the epsilon-amino group of the Lys side chain with (2-[2-(2-amino-ethoxy)-ethoxy]-acetyl)2-(gamma-Glu)-CO-(CH2)12-CO 2H
  MISC_FEATURE (20)..(20): Xaa at position 20 is Aib
  MISC_FEATURE (24)..(24): Xaa at position 24 is D-Glu
  MISC_FEATURE (25)..(25): Xaa at position 25 is alpha-methyl-Tyr
  MOD_RES (31)..(31): Lys at position 31 is chemically modified by conjugation of the epsilon-amino group of the Lys side chain with (2-[2-(2-amino-ethoxy)-ethoxy]-acetyl)2-(gamma-Glu)-CO-(CH2)12-CO 2H
  MOD_RES (39)..(39): Ser at position 39 is amidated

SEQ ID NO: 213 - protein, 39 aa, Artificial Sequence; identical to SEQ ID NO: 80
  Synthetic Construct
  MISC_FEATURE (2)..(2): Xaa at position 2 is Aib
  MISC_FEATURE (6)..(6): Xaa at position 6 is alpha-methyl-Phe(2F)
  MISC_FEATURE (10)..(10): Xaa at position 10 is 4Pal
  MISC_FEATURE (13)..(13): Xaa at position 13 is alpha-methyl-Leu
  MISC_FEATURE (16)..(16): Xaa at position 16 is Orn
  MISC_FEATURE (20)..(20): Xaa at position 20 is Aib
  MOD_RES (24)..(24): Lys at position 24 is chemically modified by conjugation of the epsilon-amino group of the Lys side chain with (2-[2-(2-amino-ethoxy)-ethoxy]-acetyl)2-(gamma-Glu)-(4-(4-tert-bu tylphenyl)butanoyl)
  MISC_FEATURE (25)..(25): Xaa at position 25 is alpha-methyl-Tyr
  MOD_RES (28)..(28): Lys at position 28 is chemically modified by conjugation of the epsilon-amino group of the Lys side chain with (2-[2-(2-amino-ethoxy)-ethoxy]-acetyl)2-(gamma-Glu)-(4-(4-tert-bu tylphenyl)butanoyl)
  MOD_RES (39)..(39): Ser at position 39 is amidated

SEQ ID NO: 214 - protein, 39 aa, Artificial Sequence; identical to SEQ ID NO: 83
  Synthetic Construct
  MISC_FEATURE (2)..(2): Xaa at position 2 is Aib
  MISC_FEATURE (6)..(6): Xaa at position 6 is alpha-methyl-Phe(2F)
  MISC_FEATURE (10)..(10): Xaa at position 10 is 4Pal
  MISC_FEATURE (13)..(13): Xaa at position 13 is alpha-methyl-Leu
  MISC_FEATURE (16)..(16): Xaa at position 16 is Orn
  MISC_FEATURE (20)..(20): Xaa at position 20 is Aib
  MOD_RES (21)..(21): Lys at position 21 is chemically modified by conjugation of the epsilon-amino group of the Lys side chain with (2-[2-(2-amino-ethoxy)-ethoxy]-acetyl)2-(gamma-Glu)-(4-(4-tert-bu tylphenyl)butanoyl)
  MISC_FEATURE (24)..(24): Xaa at position 24 is D-Glu
  MISC_FEATURE (25)..(25): Xaa at position 25 is alpha-methyl-Tyr
  MOD_RES (28)..(28): Lys at position 28 is chemically modified by conjugation of the epsilon-amino group of the Lys side chain with (2-[2-(2-amino-ethoxy)-ethoxy]-acetyl)2-(gamma-Glu)-(4-(4-tert-bu tylphenyl)butanoyl)
  MOD_RES (39)..(39): Ser at position 39 is amidated

SEQ ID NO: 215 - protein, 40 aa, Artificial Sequence; identical to SEQ ID NO: 85
  Synthetic Construct
  MISC_FEATURE (2)..(2): Xaa at position 2 is Aib
  MISC_FEATURE (6)..(6): Xaa at position 6 is alpha-methyl-Phe(2F)
  MISC_FEATURE (10)..(10): Xaa at position 10 is 4Pal
  MISC_FEATURE (13)..(13): Xaa at position 13 is alpha-methyl-Leu
  MISC_FEATURE (16)..(16): Xaa at position 16 is Orn
  MISC_FEATURE (20)..(20): Xaa at position 20 is Aib
  MOD_RES (21)..(21): Lys at position 21 is chemically modified by conjugation of the epsilon-amino group of the Lys side chain with (2-[2-(2-amino-ethoxy)-ethoxy]-acetyl)2-(gamma-Glu)-(4-(4-tert-bu tylphenyl)butanoyl)
  MISC_FEATURE (24)..(24): Xaa at position 24 is D-Glu
  MISC_FEATURE (25)..(25): Xaa at position 25 is alpha-methyl-Tyr
  MOD_RES (40)..(40): Lys at position 40 is chemically modified by conjugation of the epsilon-amino group of the Lys side chain with (2-[2-(2-amino-ethoxy)-ethoxy]-acetyl)2-(gamma-Glu)-(4-(4-tert-bu tylphenyl)butanoyl)
  MOD_RES (40)..(40): Lys at position 40 is amidated

SEQ ID NO: 216 - protein, 40 aa, Artificial Sequence
  Synthetic Construct
  MISC_FEATURE (2)..(2): Xaa at position 2 is Aib
  MISC_FEATURE (6)..(6): Xaa at position 6 is alpha-methyl-Phe(2F)
  MISC_FEATURE (10)..(10): Xaa at position 10 is 4Pal
  MISC_FEATURE (13)..(13): Xaa at position 13 is alpha-methyl-Leu
  MISC_FEATURE (16)..(16): Xaa at position 16 is Orn
  MISC_FEATURE (20)..(20): Xaa at position 20 is Aib
  MISC_FEATURE (24)..(24): Xaa at position 24 is D-Glu
  MISC_FEATURE (25)..(25): Xaa at position 25 is alpha-methyl-Tyr
  MOD_RES (28)..(28): Lys at position 28 is chemically modified by conjugation of the epsilon-amino group of the Lys side chain with (2-[2-(2-amino-ethoxy)-ethoxy]-acetyl)2-(gamma-Glu)-(4-(4-tert-bu tylphenyl)butanoyl)
  MOD_RES (40)..(40): Lys at position 40 is chemically modified by conjugation of the epsilon-amino group of the Lys side chain with (2-[2-(2-amino-ethoxy)-ethoxy]-acetyl)2-(gamma-Glu)-(4-(4-tert-bu tylphenyl)butanoyl)
  MOD_RES (40)..(40): Lys at position 40 is amidated
YXEGTXTSDXSIXLDXIAQXEFIXXLIKGGPSSGAPPPSK

SEQ ID NO: 217 - protein, 39 aa, Artificial Sequence; identical to SEQ ID NO: 25
  Synthetic Construct
  MISC_FEATURE (2)..(2): Xaa at position 2 is Aib
  MISC_FEATURE (6)..(6): Xaa at position 6 is alpha-methyl-Phe(2F)
  MISC_FEATURE (10)..(10): Xaa at position 10 is 4Pal
  MISC_FEATURE (13)..(13): Xaa at position 13 is alpha-methyl-Leu
  MISC_FEATURE (16)..(16): Xaa at position 16 is Orn
  MOD_RES (17)..(17): Lys at position 17 is chemically modified by conjugation of the epsilon-amino group of the Lys side chain with (2-[2-(2-amino-ethoxy)-ethoxy]-acetyl)2-(gamma-Glu)-(4-(4-tert-bu tylphenyl)butanoyl)
  MISC_FEATURE (20)..(20): Xaa at position 20 is Aib
  MOD_RES (21)..(21): Lys at position 21 is chemically modified by conjugation of the epsilon-amino group of the Lys side chain with (2-[2-(2-amino-ethoxy)-ethoxy]-acetyl)2-(gamma-Glu)-(4-(4-tert-bu tylphenyl)butanoyl)
  MISC_FEATURE (24)..(24): Xaa at position 24 is D-Glu
  MISC_FEATURE (25)..(25): Xaa at position 25 is alpha-methyl-Tyr
  MOD_RES (39)..(39): Ser at position 39 is amidated

SEQ ID NO: 218 - protein, 39 aa, Artificial Sequence; identical to SEQ ID NO: 27
  Synthetic Construct
  MISC_FEATURE (2)..(2): Xaa at position 2 is Aib
  MISC_FEATURE (6)..(6): Xaa at position 6 is alpha-methyl-Phe(2F)
  MISC_FEATURE (10)..(10): Xaa at position 10 is 4Pal
  MISC_FEATURE (13)..(13): Xaa at position 13 is alpha-methyl-Leu
  MISC_FEATURE (16)..(16): Xaa at position 16 is Orn
  MOD_RES (17)..(17): Lys at position 17 is chemically modified by conjugation of the epsilon-amino group of the Lys side chain with (2-[2-(2-amino-ethoxy)-ethoxy]-acetyl)-(gamma-Glu)-(4-(4-tert-but ylphenyl)butanoyl)
  MISC_FEATURE (20)..(20): Xaa at position 20 is Aib
  MISC_FEATURE (24)..(24): Xaa at position 24 is D-Glu
  MISC_FEATURE (25)..(25): Xaa at position 25 is alpha-methyl-Tyr
  MOD_RES (28)..(28): Lys at position 28 is chemically modified by conjugation of the epsilon-amino group of the Lys side chain with (2-[2-(2-amino-ethoxy)-ethoxy]-acetyl)-(gamma-Glu)-(4-(4-tert-but ylphenyl)butanoyl)
  MOD_RES (39)..(39): Ser at position 39 is amidated

SEQ ID NO: 219 - protein, 40 aa, Artificial Sequence; identical to SEQ ID NO: 29
  Synthetic Construct
  MISC_FEATURE (2)..(2): Xaa at position 2 is Aib
  MISC_FEATURE (6)..(6): Xaa at position 6 is alpha-methyl-Phe(2F)
  MISC_FEATURE (10)..(10): Xaa at position 10 is 4Pal
  MISC_FEATURE (13)..(13): Xaa at position 13 is alpha-methyl-Leu
  MISC_FEATURE (16)..(16): Xaa at position 16 is Orn
  MOD_RES (17)..(17): Lys at position 17 is chemically modified by conjugation of the epsilon-amino group of the Lys side chain with (2-[2-(2-amino-ethoxy)-ethoxy]-acetyl)-(gamma-Glu)-(4-(4-tert-but ylphenyl)butanoyl)
  MISC_FEATURE (20)..(20): Xaa at position 20 is Aib
  MISC_FEATURE (24)..(24): Xaa at position 24 is D-Glu
  MISC_FEATURE (25)..(25): Xaa at position 25 is alpha-methyl-Tyr
  MOD_RES (40)..(40): Lys at position 40 is chemically modified by conjugation of the epsilon-amino group of the Lys side chain with (2-[2-(2-amino-ethoxy)-ethoxy]-acetyl)-(gamma-Glu)-(4-(4-tert-but ylphenyl)butanoyl)
  MOD_RES (40)..(40): Lys at position 40 is amidated

SEQ ID NO: 220 - protein, 39 aa, Artificial Sequence; identical to SEQ ID NO: 27
  Synthetic Construct
  MISC_FEATURE (2)..(2): Xaa at position 2 is Aib
  MISC_FEATURE (6)..(6): Xaa at position 6 is alpha-methyl-Phe(2F)
  MISC_FEATURE (10)..(10): Xaa at position 10 is 4Pal
  MISC_FEATURE (13)..(13): Xaa at position 13 is alpha-methyl-Leu
  MISC_FEATURE (16)..(16): Xaa at position 16 is Orn
  MOD_RES (17)..(17): Lys at position 17 is chemically modified by conjugation of the epsilon-amino group of the Lys side chain with (2-[2-(2-amino-ethoxy)-ethoxy]-acetyl)2-CO-(CH2)12-CO2H
  MISC_FEATURE (20)..(20): Xaa at position 20 is Aib
  MISC_FEATURE (24)..(24): Xaa at position 24 is D-Glu
  MISC_FEATURE (25)..(25): Xaa at position 25 is alpha-methyl-Tyr
  MOD_RES (28)..(28): Lys at position 28 is chemically modified by conjugation of the epsilon-amino group of the Lys side chain with (2-[2-(2-amino-ethoxy)-ethoxy]-acetyl)2-CO-(CH2)12-CO2H
  MOD_RES (39)..(39): Ser at position 39 is amidated

SEQ ID NO: 221 - protein, 39 aa, Artificial Sequence; identical to SEQ ID NO: 99
  Synthetic Construct
  MISC_FEATURE (2)..(2): Xaa at position 2 is Aib
  MISC_FEATURE (6)..(6): Xaa at position 6 is alpha-methyl-Phe(2F)
  MISC_FEATURE (10)..(10): Xaa at position 10 is 4Pal
  MISC_FEATURE (11)..(11): Xaa at position 11 is Ac5c
  MISC_FEATURE (13)..(13): Xaa at position 13 is alpha-methyl-Leu
  MISC_FEATURE (16)..(16): Xaa at position 16 is Orn
  MOD_RES (17)..(17): Lys at position 17 is chemically modified by conjugation of the epsilon-amino group of the Lys side chain with (2-[2-(2-amino-ethoxy)-ethoxy]-acetyl)2-(gamma-Glu)-CO-(CH2)12-CO 2H
  MISC_FEATURE (20)..(20): Xaa at position 20 is Aib
  MISC_FEATURE (24)..(24): Xaa at position 24 is D-Glu
  MISC_FEATURE (25)..(25): Xaa at position 25 is alpha-methyl-Tyr
  MOD_RES (31)..(31): Lys at position 31 is chemically modified by conjugation of the epsilon-amino group of the Lys side chain with (2-[2-(2-amino-ethoxy)-ethoxy]-acetyl)2-(gamma-Glu)-CO-(CH2)12-CO 2H
  MOD_RES (39)..(39): Ser at position 39 is amidated

SEQ ID NO: 222 - protein, 39 aa, Artificial Sequence; identical to SEQ ID NO: 101
  Synthetic Construct
  MISC_FEATURE (2)..(2): Xaa at position 2 is Aib
  MISC_FEATURE (6)..(6): Xaa at position 6 is alpha-methyl-Phe(2F)
  MISC_FEATURE (11)..(11): Xaa at position 11 is alpha-methyl-Ser
  MISC_FEATURE (13)..(13): Xaa at position 13 is alpha-methyl-Leu
  MISC_FEATURE (16)..(16): Xaa at position 16 is Orn
  MOD_RES (17)..(17): Lys at position 17 is chemically modified by conjugation of the epsilon-amino group of the Lys side chain with (2-[2-(2-amino-ethoxy)-ethoxy]-acetyl)2-(gamma-Glu)-CO-(CH2)12-CO 2H
  MISC_FEATURE (20)..(20): Xaa at position 20 is Aib
  MISC_FEATURE (24)..(24): Xaa at position 24 is D-Glu
  MISC_FEATURE (25)..(25): Xaa at position 25 is alpha-methyl-Tyr
  MOD_RES (31)..(31): Lys at position 31 is chemically modified by conjugation of the epsilon-amino group of the Lys side chain with (2-[2-(2-amino-ethoxy)-ethoxy]-acetyl)2-(gamma-Glu)-CO-(CH2)12-CO 2H
  MOD_RES (39)..(39): Ser at position 39 is amidated

SEQ ID NO: 223 - protein, 39 aa, Artificial Sequence; identical to SEQ ID NO: 99
  Synthetic Construct
  MISC_FEATURE (2)..(2): Xaa at position 2 is Aib
  MISC_FEATURE (6)..(6): Xaa at position 6 is alpha-methyl-Phe(2F)
  MISC_FEATURE (10)..(10): Xaa at position 10 is 4Pal
  MISC_FEATURE (11)..(11): Xaa at position 11 is alpha-methyl-Ser
  MISC_FEATURE (13)..(13): Xaa at position 13 is alpha-methyl-Leu
  MISC_FEATURE (16)..(16): Xaa at position 16 is Orn
  MOD_RES (17)..(17): Lys at position 17 is chemically modified by conjugation of the epsilon-amino group of the Lys side chain with (2-[2-(2-amino-ethoxy)-ethoxy]-acetyl)2-(gamma-Glu)-CO-(CH2)12-CO 2H
  MISC_FEATURE (20)..(20): Xaa at position 20 is Aib
  MISC_FEATURE (24)..(24): Xaa at position 24 is D-Glu
  MISC_FEATURE (25)..(25): Xaa at position 25 is alpha-methyl-Tyr
  MOD_RES (31)..(31): Lys at position 31 is chemically modified by conjugation of the epsilon-amino group of the Lys side chain with (2-[2-(2-amino-ethoxy)-ethoxy]-acetyl)2-(gamma-Glu)-CO-(CH2)12-CO 2H
  MOD_RES (39)..(39): Ser at position 39 is amidated

SEQ ID NO: 224 - protein, 39 aa, Artificial Sequence; identical to SEQ ID NO: 123
  Synthetic Construct
  MISC_FEATURE (2)..(2): Xaa at position 2 is Aib
  MISC_FEATURE (6)..(6): Xaa at position 6 is alpha-methyl-Phe(2F)
  MISC_FEATURE (10)..(10): Xaa at position 10 is 4Pal
  MISC_FEATURE (11)..(11): Xaa at position 11 is alpha-methyl-Ser
  MISC_FEATURE (13)..(13): Xaa at position 13 is alpha-methyl-Leu
  MISC_FEATURE (16)..(16): Xaa at position 16 is Orn
  MOD_RES (17)..(17): Lys at position 17 is chemically modified by conjugation of the epsilon-amino group of the Lys side chain with (2-[2-(2-amino-ethoxy)-ethoxy]-acetyl)2-(gamma-Glu)-CO-(CH2)12-CO 2H
  MISC_FEATURE (20)..(20): Xaa at position 20 is Aib
  MOD_RES (24)..(24): Lys at position 24 is chemically modified by conjugation of the epsilon-amino group of the Lys side chain with (2-[2-(2-amino-ethoxy)-ethoxy]-acetyl)2-(gamma-Glu)-CO-(CH2)12-CO 2H
  MISC_FEATURE (25)..(25): Xaa at position 25 is alpha-methyl-Tyr
  MOD_RES (39)..(39): Ser at position 39 is amidated

SEQ ID NO: 225 - protein, 39 aa, Artificial Sequence
  Synthetic Construct
  MISC_FEATURE (2)..(2): Xaa at position 2 is Aib
  MISC_FEATURE (6)..(6): Xaa at position 6 is alpha-methyl-Phe(2F)
  MISC_FEATURE (10)..(10): Xaa at position 10 is 4Pal
  MISC_FEATURE (11)..(11): Xaa at position 11 is alpha-methyl-Ser
  MISC_FEATURE (13)..(13): Xaa at position 13 is alpha-methyl-Leu
  MISC_FEATURE (16)..(16): Xaa at position 16 is Orn
  MISC_FEATURE (20)..(20): Xaa at position 20 is Aib
  MOD_RES (21)..(21): Lys at position 21 is chemically modified by conjugation of the epsilon-amino group of the Lys side chain with (2-[2-(2-amino-ethoxy)-ethoxy]-acetyl)2-(gamma-Glu)-CO-(CH2)12-CO 2H
  MOD_RES (24)..(24): Lys at position 24 is chemically modified by conjugation of the epsilon-amino group of the Lys side chain with (2-[2-(2-amino-ethoxy)-ethoxy]-acetyl)2-(gamma-Glu)-CO-(CH2)12-CO 2H
  MISC_FEATURE (25)..(25): Xaa at position 25 is alpha-methyl-Tyr
  MOD_RES (39)..(39): Ser at position 39 is amidated
YXEGTXTSDXXIXLDXIAQXKFIKXLIEGGPSSGAPPPS

SEQ ID NO: 226 - protein, 39 aa, Artificial Sequence
  Synthetic Construct
  MISC_FEATURE (2)..(2): Xaa at position 2 is Aib
  MISC_FEATURE (6)..(6): Xaa at position 6 is alpha-methyl-Phe(2F)
  MISC_FEATURE (10)..(10): Xaa at position 10 is 4Pal
  MISC_FEATURE (11)..(11): Xaa at position 11 is alpha-methyl-Ser
  MISC_FEATURE (13)..(13): Xaa at position 13 is alpha-methyl-Leu
  MISC_FEATURE (16)..(16): Xaa at position 16 is Orn
  MISC_FEATURE (20)..(20): Xaa at position 20 is Aib
  MOD_RES (24)..(24): Lys at position 24 is chemically modified by conjugation of the epsilon-amino group of the Lys side chain with (2-[2-(2-amino-ethoxy)-ethoxy]-acetyl)2-(gamma-Glu)-CO-(CH2)12-CO 2H
  MISC_FEATURE (25)..(25): Xaa at position 25 is alpha-methyl-Tyr
  MOD_RES (28)..(28): Lys at position 28 is chemically modified by conjugation of the epsilon-amino group of the Lys side chain with (2-[2-(2-amino-ethoxy)-ethoxy]-acetyl)2-(gamma-Glu)-CO-(CH2)12-CO 2H
  MOD_RES (39)..(39): Ser at position 39 is amidated
YXEGTXTSDXXIXLDXIAQXEFIKXLIKGGPSSGAPPPS

SEQ ID NO: 227 - protein, 39 aa, Artificial Sequence
  Synthetic Construct
  MISC_FEATURE (2)..(2): Xaa at position 2 is Aib
  MISC_FEATURE (6)..(6): Xaa at position 6 is alpha-methyl-Phe(2F)
  MISC_FEATURE (10)..(10): Xaa at position 10 is 4Pal
  MISC_FEATURE (11)..(11): Xaa at position 11 is alpha-methyl-Ser
  MISC_FEATURE (13)..(13): Xaa at position 13 is alpha-methyl-Leu
  MISC_FEATURE (16)..(16): Xaa at position 16 is Orn
  MISC_FEATURE (20)..(20): Xaa at position 20 is Aib
  MOD_RES (21)..(21): Lys at position 21 is chemically modified by conjugation of the epsilon-amino group of the Lys side chain with (2-[2-(2-amino-ethoxy)-ethoxy]-acetyl)2-(gamma-Glu)-CO-(CH2)12-CO 2H
  MISC_FEATURE (24)..(24): Xaa at position 24 is D-Glu
  MISC_FEATURE (25)..(25): Xaa at position 25 is alpha-methyl-Tyr
  MOD_RES (28)..(28): Lys at position 28 is chemically modified by conjugation of the epsilon-amino group of the Lys side chain with (2-[2-(2-amino-ethoxy)-ethoxy]-acetyl)2-(gamma-Glu)-CO-(CH2)12-CO 2H
  MOD_RES (39)..(39): Ser at position 39 is amidated
YXEGTXTSDXXIXLDXIAQXKFIXXLIKGGPSSGAPPPS

SEQ ID NO: 228 - protein, 39 aa, Artificial Sequence; identical to SEQ ID NO: 225
  Synthetic Construct
  MISC_FEATURE (2)..(2): Xaa at position 2 is Aib
  MISC_FEATURE (6)..(6): Xaa at position 6 is alpha-methyl-Phe(2F)
  MISC_FEATURE (10)..(10): Xaa at position 10 is 4Pal
  MISC_FEATURE (11)..(11): Xaa at position 11 is Aib
  MISC_FEATURE (13)..(13): Xaa at position 13 is alpha-methyl-Leu
  MISC_FEATURE (16)..(16): Xaa at position 16 is Orn
  MISC_FEATURE (20)..(20): Xaa at position 20 is Aib
  MOD_RES (21)..(21): Lys at position 21 is chemically modified by conjugation of the epsilon-amino group of the Lys side chain with (2-[2-(2-amino-ethoxy)-ethoxy]-acetyl)2-(gamma-Glu)-CO-(CH2)12-CO 2H
  MOD_RES (24)..(24): Lys at position 24 is chemically modified by conjugation of the epsilon-amino group of the Lys side chain with (2-[2-(2-amino-ethoxy)-ethoxy]-acetyl)2-(gamma-Glu)-CO-(CH2)12-CO 2H
  MISC_FEATURE (25)..(25): Xaa at position 25 is alpha-methyl-Tyr
  MOD_RES (39)..(39): Ser at position 39 is amidated

SEQ ID NO: 229 - protein, 39 aa, Artificial Sequence; identical to SEQ ID NO: 226
  Synthetic Construct
  MISC_FEATURE (2)..(2): Xaa at position 2 is Aib
  MISC_FEATURE (6)..(6): Xaa at position 6 is alpha-methyl-Phe(2F)
  MISC_FEATURE (10)..(10): Xaa at position 10 is 4Pal
  MISC_FEATURE (11)..(11): Xaa at position 11 is Aib
  MISC_FEATURE (13)..(13): Xaa at position 13 is alpha-methyl-Leu
  MISC_FEATURE (16)..(16): Xaa at position 16 is Orn
  MISC_FEATURE (20)..(20): Xaa at position 20 is Aib
  MOD_RES (24)..(24): Lys at position 24 is chemically modified by conjugation of the epsilon-amino group of the Lys side chain with (2-[2-(2-amino-ethoxy)-ethoxy]-acetyl)2-(gamma-Glu)-CO-(CH2)12-CO 2H
  MISC_FEATURE (25)..(25): Xaa at position 25 is alpha-methyl-Tyr
  MOD_RES (28)..(28): Lys at position 28 is chemically modified by conjugation of the epsilon-amino group of the Lys side chain with (2-[2-(2-amino-ethoxy)-ethoxy]-acetyl)2-(gamma-Glu)-CO-(CH2)12-CO 2H
  MOD_RES (39)..(39): Ser at position 39 is amidated

SEQ ID NO: 230 - protein, 39 aa, Artificial Sequence; identical to SEQ ID NO: 227
  Synthetic Construct
  MISC_FEATURE (2)..(2): Xaa at position 2 is Aib
  MISC_FEATURE (6)..(6): Xaa at position 6 is alpha-methyl-Phe(2F)
  MISC_FEATURE (10)..(10): Xaa at position 10 is 4Pal
  MISC_FEATURE (11)..(11): Xaa at position 11 is Aib
  MISC_FEATURE (13)..(13): Xaa at position 13 is alpha-methyl-Leu
  MISC_FEATURE (16)..(16): Xaa at position 16 is Orn
  MISC_FEATURE (20)..(20): Xaa at position 20 is Aib
  MOD_RES (21)..(21): Lys at position 21 is chemically modified by conjugation of the epsilon-amino group of the Lys side chain with (2-[2-(2-amino-ethoxy)-ethoxy]-acetyl)2-(gamma-Glu)-CO-(CH2)12-CO 2H
  MISC_FEATURE (24)..(24): Xaa at position 24 is D-Glu
  MISC_FEATURE (25)..(25): Xaa at position 25 is alpha-methyl-Tyr
  MOD_RES (28)..(28): Lys at position 28 is chemically modified by conjugation of the epsilon-amino group of the Lys side chain with (2-[2-(2-amino-ethoxy)-ethoxy]-acetyl)2-(gamma-Glu)-CO-(CH2)12-CO 2H
  MOD_RES (39)..(39): Ser at position 39 is amidated

SEQ ID NO: 231 - protein, 40 aa, Artificial Sequence; identical to SEQ ID NO: 29
  Synthetic Construct
  MISC_FEATURE (2)..(2): Xaa at position 2 is Aib
  MISC_FEATURE (6)..(6): Xaa at position 6 is alpha-methyl-Phe(2F)
  MISC_FEATURE (10)..(10): Xaa at position 10 is 4Pal
  MISC_FEATURE (13)..(13): Xaa at position 13 is alpha-methyl-Leu
  MISC_FEATURE (16)..(16): Xaa at position 16 is Orn
  MOD_RES (17)..(17): Lys at position 17 is chemically modified by conjugation of the epsilon-amino group of the Lys side chain with (2-[2-(2-amino-ethoxy)-ethoxy]-acetyl)2-(gamma-Glu)-CO-(CH2)12-CO 2H
  MISC_FEATURE (20)..(20): Xaa at position 20 is Aib
  MISC_FEATURE (24)..(24): Xaa at position 24 is D-Glu
  MISC_FEATURE (25)..(25): Xaa at position 25 is alpha-methyl-Tyr
  MOD_RES (40)..(40): Lys at position 40 is chemically modified by conjugation of the epsilon-amino group of the Lys side chain with (2-[2-(2-amino-ethoxy)-ethoxy]-acetyl)2-(gamma-Glu)-CO-(CH2)12-CO 2H
  MOD_RES (40)..(40): Lys at position 40 is amidated

SEQ ID NO: 232 - protein, 39 aa, Artificial Sequence; identical to SEQ ID NO: 83
  Synthetic Construct
  MISC_FEATURE (2)..(2): Xaa at position 2 is Aib
  MISC_FEATURE (6)..(6): Xaa at position 6 is alpha-methyl-Phe(2F)
  MISC_FEATURE (10)..(10): Xaa at position 10 is 4Pal
  MISC_FEATURE (13)..(13): Xaa at position 13 is alpha-methyl-Leu
  MISC_FEATURE (16)..(16): Xaa at position 16 is Orn
  MISC_FEATURE (20)..(20): Xaa at position 20 is Aib
  MOD_RES (21)..(21): Lys at position 21 is chemically modified by conjugation of the epsilon-amino group of the Lys side chain with (2-[2-(2-amino-ethoxy)-ethoxy]-acetyl)2-CO-(CH2)12-CO2H
  MISC_FEATURE (24)..(24): Xaa at position 24 is D-Glu
  MISC_FEATURE (25)..(25): Xaa at position 25 is alpha-methyl-Tyr
  MOD_RES (28)..(28): Lys at position 28 is chemically modified by conjugation of the epsilon-amino group of the Lys side chain with (2-[2-(2-amino-ethoxy)-ethoxy]-acetyl)2-CO-(CH2)12-CO2H
  MOD_RES (39)..(39): Ser at position 39 is amidated

SEQ ID NO: 233 - protein, 40 aa, Artificial Sequence; identical to SEQ ID NO: 216
  Synthetic Construct
  MISC_FEATURE (2)..(2): Xaa at position 2 is Aib
  MISC_FEATURE (6)..(6): Xaa at position 6 is alpha-methyl-Phe(2F)
  MISC_FEATURE (10)..(10): Xaa at position 10 is 4Pal
  MISC_FEATURE (13)..(13): Xaa at position 13 is alpha-methyl-Leu
  MISC_FEATURE (16)..(16): Xaa at position 16 is Orn
  MISC_FEATURE (20)..(20): Xaa at position 20 is Aib
  MISC_FEATURE (24)..(24): Xaa at position 24 is D-Glu
  MISC_FEATURE (25)..(25): Xaa at position 25 is alpha-methyl-Tyr
  MOD_RES (28)..(28): Lys at position 28 is chemically modified by conjugation of the epsilon-amino group of the Lys side chain with (2-[2-(2-amino-ethoxy)-ethoxy]-acetyl)2-CO-(CH2)12-CO2H
  MOD_RES (40)..(40): Lys at position 40 is chemically modified by conjugation of the epsilon-amino group of the Lys side chain with (2-[2-(2-amino-ethoxy)-ethoxy]-acetyl)2-CO-(CH2)12-CO2H
  MOD_RES (40)..(40): Lys at position 40 is amidated

SEQ ID NO: 234 - protein, 39 aa, Artificial Sequence; identical to SEQ ID NO: 27
  Synthetic Construct
  MISC_FEATURE (2)..(2): Xaa at position 2 is Aib
  MISC_FEATURE (6)..(6): Xaa at position 6 is alpha-methyl-Phe(2F)
  MISC_FEATURE (10)..(10): Xaa at position 10 is 4Pal
  MISC_FEATURE (13)..(13): Xaa at position 13 is alpha-methyl-Leu
  MISC_FEATURE (16)..(16): Xaa at position 16 is Orn
  MOD_RES (17)..(17): Lys at position 17 is chemically modified by conjugation of the epsilon-amino group of the Lys side chain with (2-[2-(2-amino-ethoxy)-ethoxy]-acetyl)3-(gamma-Glu)-CO-(CH2)12-CO 2H
  MISC_FEATURE (20)..(20): Xaa at position 20 is Aib
  MISC_FEATURE (24)..(24): Xaa at position 24 is D-Glu
  MISC_FEATURE (25)..(25): Xaa at position 25 is alpha-methyl-Tyr
  MOD_RES (28)..(28): Lys at position 28 is chemically modified by conjugation of the epsilon-amino group of the Lys side chain with (2-[2-(2-amino-ethoxy)-ethoxy]-acetyl)3-(gamma-Glu)-CO-(CH2)12-CO 2H
  MOD_RES (39)..(39): Ser at position 39 is amidated

SEQ ID NO: 235 - protein, 40 aa, Artificial Sequence; identical to SEQ ID NO: 29
  Synthetic Construct
  MISC_FEATURE (2)..(2): Xaa at position 2 is Aib
  MISC_FEATURE (6)..(6): Xaa at position 6 is alpha-methyl-Phe(2F)
  MISC_FEATURE (10)..(10): Xaa at position 10 is 4Pal
  MISC_FEATURE (13)..(13): Xaa at position 13 is alpha-methyl-Leu
  MISC_FEATURE (16)..(16): Xaa at position 16 is Orn
  MOD_RES (17)..(17): Lys at position 17 is chemically modified by conjugation of the epsilon-amino group of the Lys side chain with (2-[2-(2-amino-ethoxy)-ethoxy]-acetyl)3-(gamma-Glu)-CO-(CH2)12-CO 2H
  MISC_FEATURE (20)..(20): Xaa at position 20 is Aib
  MISC_FEATURE (24)..(24): Xaa at position 24 is D-Glu
  MISC_FEATURE (25)..(25): Xaa at position 25 is alpha-methyl-Tyr
  MOD_RES (40)..(40): Lys at position 40 is chemically modified by conjugation of the epsilon-amino group of the Lys side chain with (2-[2-(2-amino-ethoxy)-ethoxy]-acetyl)3-(gamma-Glu)-CO-(CH2)12-CO 2H
  MOD_RES (40)..(40): Lys at position 40 is amidated

SEQ ID NO: 236 - protein, 39 aa, Artificial Sequence; identical to SEQ ID NO: 80
  Synthetic Construct
  MISC_FEATURE (2)..(2): Xaa at position 2 is Aib
  MISC_FEATURE (6)..(6): Xaa at position 6 is alpha-methyl-Phe(2F)
  MISC_FEATURE (10)..(10): Xaa at position 10 is 4Pal
  MISC_FEATURE (13)..(13): Xaa at position 13 is alpha-methyl-Leu
  MISC_FEATURE (16)..(16): Xaa at position 16 is Orn
  MISC_FEATURE (20)..(20): Xaa at position 20 is Aib
  MOD_RES (24)..(24): Lys at position 24 is chemically modified by conjugation of the epsilon-amino group of the Lys side chain with (2-[2-(2-amino-ethoxy)-ethoxy]-acetyl)3-(gamma-Glu)-CO-(CH2)12-CO 2H
  MISC_FEATURE (25)..(25): Xaa at position 25 is alpha-methyl-Tyr
  MOD_RES (28)..(28): Lys at position 28 is chemically modified by conjugation of the epsilon-amino group of the Lys side chain with (2-[2-(2-amino-ethoxy)-ethoxy]-acetyl)3-(gamma-Glu)-CO-(CH2)12-CO 2H
  MOD_RES (39)..(39): Ser at position 39 is amidated

SEQ ID NO: 237 - protein, 39 aa, Artificial Sequence; identical to SEQ ID NO: 83
  Synthetic Construct
  MISC_FEATURE (2)..(2): Xaa at position 2 is Aib
  MISC_FEATURE (6)..(6): Xaa at position 6 is alpha-methyl-Phe(2F)
  MISC_FEATURE (10)..(10): Xaa at position 10 is 4Pal
  MISC_FEATURE (13)..(13): Xaa at position 13 is alpha-methyl-Leu
  MISC_FEATURE (16)..(16): Xaa at position 16 is Orn
  MISC_FEATURE (20)..(20): Xaa at position 20 is Aib
  MOD_RES (21)..(21): Lys at position 21 is chemically modified by conjugation of the epsilon-amino group of the Lys side chain with (2-[2-(2-amino-ethoxy)-ethoxy]-acetyl)3-(gamma-Glu)-CO-(CH2)12-CO 2H
  MISC_FEATURE (24)..(24): Xaa at position 24 is D-Glu
  MISC_FEATURE (25)..(25): Xaa at position 25 is alpha-methyl-Tyr
  MOD_RES (28)..(28): Lys at position 28 is chemically modified by conjugation of the epsilon-amino group of the Lys side chain with (2-[2-(2-amino-ethoxy)-ethoxy]-acetyl)3-(gamma-Glu)-CO-(CH2)12-CO 2H
  MOD_RES (39)..(39): Ser at position 39 is amidated

SEQ ID NO: 238 - protein, 40 aa, Artificial Sequence; identical to SEQ ID NO: 85
  Synthetic Construct
  MISC_FEATURE (2)..(2): Xaa at position 2 is Aib
  MISC_FEATURE (6)..(6): Xaa at position 6 is alpha-methyl-Phe(2F)
  MISC_FEATURE (10)..(10): Xaa at position 10 is 4Pal
  MISC_FEATURE (13)..(13): Xaa at position 13 is alpha-methyl-Leu
  MISC_FEATURE (16)..(16): Xaa at position 16 is Orn
  MISC_FEATURE (20)..(20): Xaa at position 20 is Aib
  MOD_RES (21)..(21): Lys at position 21 is chemically modified by conjugation of the epsilon-amino group of the Lys side chain with (2-[2-(2-amino-ethoxy)-ethoxy]-acetyl)3-(gamma-Glu)-CO-(CH2)12-CO 2H
  MISC_FEATURE (24)..(24): Xaa at position 24 is D-Glu
  MISC_FEATURE (25)..(25): Xaa at position 25 is alpha-methyl-Tyr
  MOD_RES (40)..(40): Lys at position 40 is chemically modified by conjugation of the epsilon-amino group of the Lys side chain with (2-[2-(2-amino-ethoxy)-ethoxy]-acetyl)3-(gamma-Glu)-CO-(CH2)12-CO 2H
  MOD_RES (40)..(40): Lys at position 40 is amidated

SEQ ID NO: 239 - protein, 40 aa, Artificial Sequence; identical to SEQ ID NO: 216
  Synthetic Construct
  MISC_FEATURE (2)..(2): Xaa at position 2 is Aib
  MISC_FEATURE (6)..(6): Xaa at position 6 is alpha-methyl-Phe(2F)
  MISC_FEATURE (10)..(10): Xaa at position 10 is 4Pal
  MISC_FEATURE (13)..(13): Xaa at position 13 is alpha-methyl-Leu
  MISC_FEATURE (16)..(16): Xaa at position 16 is Orn
  MISC_FEATURE (20)..(20): Xaa at position 20 is Aib
  MISC_FEATURE (24)..(24): Xaa at position 24 is D-Glu
  MISC_FEATURE (25)..(25): Xaa at position 25 is alpha-methyl-Tyr
  MOD_RES (28)..(28): Lys at position 28 is chemically modified by conjugation of the epsilon-amino group of the Lys side chain with (2-[2-(2-amino-ethoxy)-ethoxy]-acetyl)3-(gamma-Glu)-CO-(CH2)12-CO 2H
  MOD_RES (40)..(40): Lys at position 40 is chemically modified by conjugation of the epsilon-amino group of the Lys side chain with (2-[2-(2-amino-ethoxy)-ethoxy]-acetyl)3-(gamma-Glu)-CO-(CH2)12-CO 2H
  MOD_RES (40)..(40): Lys at position 40 is amidated

SEQ ID NO: 240 - protein, 39 aa, Artificial Sequence
  Synthetic Construct
  MISC_FEATURE (2)..(2): Xaa at position 2 is Aib
  MISC_FEATURE (6)..(6): Xaa at position 6 is alpha-methyl-Phe(2F)
  MISC_FEATURE (11)..(11): Xaa at position 11 is Aib
  MISC_FEATURE (13)..(13): Xaa at position 13 is alpha-methyl-Leu
  MISC_FEATURE (16)..(16): Xaa at position 16 is Orn
  MOD_RES (17)..(17): Lys at position 17 is chemically modified by conjugation of the epsilon-amino group of the Lys side chain with (2-[2-(2-amino-ethoxy)-ethoxy]-acetyl)2-(gamma-Glu)-CO-(CH2)12-CO 2H
  MISC_FEATURE (20)..(20): Xaa at position 20 is Aib
  MOD_RES (21)..(21): Lys at position 21 is chemically modified by conjugation of the epsilon-amino group of the Lys side chain with (2-[2-(2-amino-ethoxy)-ethoxy]-acetyl)2-(gamma-Glu)-CO-(CH2)12-CO 2H
  MISC_FEATURE (24)..(24): Xaa at position 24 is D-Glu
  MISC_FEATURE (25)..(25): Xaa at position 25 is alpha-methyl-Tyr
  MOD_RES (39)..(39): Ser at position 39 is amidated
YXEGTXTSDYXIXLDXKAQXKFIXXLIEGGPSSGAPPPS

SEQ ID NO: 241 - protein, 39 aa, Artificial Sequence
  Synthetic Construct
  MISC_FEATURE (2)..(2): Xaa at position 2 is Aib
  MISC_FEATURE (6)..(6): Xaa at position 6 is alpha-methyl-Phe(2F)
  MISC_FEATURE (11)..(11): Xaa at position 11 is Aib
  MISC_FEATURE (13)..(13): Xaa at position 13 is alpha-methyl-Leu
  MISC_FEATURE (16)..(16): Xaa at position 16 is Orn
  MOD_RES (17)..(17): Lys at position 17 is chemically modified by conjugation of the epsilon-amino group of the Lys side chain with (2-[2-(2-amino-ethoxy)-ethoxy]-acetyl)2-(gamma-Glu)-CO-(CH2)12-CO 2H
  MISC_FEATURE (20)..(20): Xaa at position 20 is Aib
  MISC_FEATURE (24)..(24): Xaa at position 24 is D-Glu
  MISC_FEATURE (25)..(25): Xaa at position 25 is alpha-methyl-Tyr
  MOD_RES (28)..(28): Lys at position 28 is chemically modified by conjugation of the epsilon-amino group of the Lys side chain with (2-[2-(2-amino-ethoxy)-ethoxy]-acetyl)2-(gamma-Glu)-CO-(CH2)12-CO 2H
  MOD_RES (39)..(39): Ser at position 39 is amidated
YXEGTXTSDYXIXLDXKAQXEFIXXLIKGGPSSGAPPPS

SEQ ID NO: 242 - protein, 40 aa, Artificial Sequence
  Synthetic Construct
  MISC_FEATURE (2)..(2): Xaa at position 2 is Aib
  MISC_FEATURE (6)..(6): Xaa at position 6 is alpha-methyl-Phe(2F)
  MISC_FEATURE (11)..(11): Xaa at position 11 is Aib
  MISC_FEATURE (13)..(13): Xaa at position 13 is alpha-methyl-Leu
  MISC_FEATURE (16)..(16): Xaa at position 16 is Orn
  MOD_RES (17)..(17): Lys at position 17 is chemically modified by conjugation of the epsilon-amino group of the Lys side chain with (2-[2-(2-amino-ethoxy)-ethoxy]-acetyl)2-(gamma-Glu)-CO-(CH2)12-CO 2H
  MISC_FEATURE (20)..(20): Xaa at position 20 is Aib
  MISC_FEATURE (24)..(24): Xaa at position 24 is D-Glu
  MISC_FEATURE (25)..(25): Xaa at position 25 is alpha-methyl-Tyr
  MOD_RES (40)..(40): Lys at position 40 is chemically modified by conjugation of the epsilon-amino group of the Lys side chain with (2-[2-(2-amino-ethoxy)-ethoxy]-acetyl)2-(gamma-Glu)-CO-(CH2)12-CO 2H
  MOD_RES (40)..(40): Lys at position 40 is amidated
YXEGTXTSDYXIXLDXKAQXEFIXXLIEGGPSSGAPPPSK

SEQ ID NO: 243 - protein, 39 aa, Artificial Sequence
  Synthetic Construct
  MISC_FEATURE (2)..(2): Xaa at position 2 is Aib
  MISC_FEATURE (6)..(6): Xaa at position 6 is alpha-methyl-Phe(2F)
  MISC_FEATURE (11)..(11): Xaa at position 11 is Aib
  MISC_FEATURE (13)..(13): Xaa at position 13 is alpha-methyl-Leu
  MISC_FEATURE (16)..(16): Xaa at position 16 is Orn
  MISC_FEATURE (20)..(20): Xaa at position 20 is Aib
  MOD_RES (24)..(24): Lys at position 24 is chemically modified by conjugation of the epsilon-amino group of the Lys side chain with (2-[2-(2-amino-ethoxy)-ethoxy]-acetyl)2-(gamma-Glu)-CO-(CH2)12-CO 2H
  MISC_FEATURE (25)..(25): Xaa at position 25 is alpha-methyl-Tyr
  MOD_RES (28)..(28): Lys at position 28 is chemically modified by conjugation of the epsilon-amino group of the Lys side chain with (2-[2-(2-amino-ethoxy)-ethoxy]-acetyl)2-(gamma-Glu)-CO-(CH2)12-CO 2H
  MOD_RES (39)..(39): Ser at position 39 is amidated
YXEGTXTSDYXIXLDXIAQXEFIKXLIKGGPSSGAPPPS

SEQ ID NO: 244 - protein, 39 aa, Artificial Sequence
  Synthetic Construct
  MISC_FEATURE (2)..(2): Xaa at position 2 is Aib
  MISC_FEATURE (6)..(6): Xaa at position 6 is alpha-methyl-Phe(2F)
  MISC_FEATURE (11)..(11): Xaa at position 11 is Aib
  MISC_FEATURE (13)..(13): Xaa at position 13 is alpha-methyl-Leu
  MISC_FEATURE (16)..(16): Xaa at position 16 is Orn
  MISC_FEATURE (20)..(20): Xaa at position 20 is Aib
  MISC_FEATURE (24)..(24): Xaa at position 24 is D-Glu
  MISC_FEATURE (25)..(25): Xaa at position 25 is alpha-methyl-Tyr
  MOD_RES (28)..(28): Lys at position 28 is chemically modified by conjugation of the epsilon-amino group of the Lys side chain with (2-[2-(2-amino-ethoxy)-ethoxy]-acetyl)2-(gamma-Glu)-CO-(CH2)12-CO 2H
  MOD_RES (39)..(39): Ser at position 39 is amidated
YXEGTXTSDYXIXLDXIAQXKFIXXLIKGGPSSGAPPPS

SEQ ID NO: 245 - protein, 40 aa, Artificial Sequence
  Synthetic Construct
  MISC_FEATURE (2)..(2): Xaa at position 2 is Aib
  MISC_FEATURE (6)..(6): Xaa at position 6 is alpha-methyl-Phe(2F)
  MISC_FEATURE (11)..(11): Xaa at position 11 is Aib
  MISC_FEATURE (13)..(13): Xaa at position 13 is alpha-methyl-Leu
  MISC_FEATURE (16)..(16): Xaa at position 16 is Orn
  MISC_FEATURE (20)..(20): Xaa at position 20 is Aib
  MOD_RES (21)..(21): Lys at position 21 is chemically modified by conjugation of the epsilon-amino group of the Lys side chain with (2-[2-(2-amino-ethoxy)-ethoxy]-acetyl)2-(gamma-Glu)-CO-(CH2)12-CO 2H
  MISC_FEATURE (24)..(24): Xaa at position 24 is D-Glu
  MISC_FEATURE (25)..(25): Xaa at position 25 is alpha-methyl-Tyr
  MOD_RES (40)..(40): Lys at position 40 is chemically modified by conjugation of the epsilon-amino group of the Lys side chain with (2-[2-(2-amino-ethoxy)-ethoxy]-acetyl)2-(gamma-Glu)-CO-(CH2)12-CO 2H
  MOD_RES (40)..(40): Lys at position 40 is amidated
YXEGTXTSDYXIXLDXIAQXKFIXXLIEGGPSSGAPPPSK

SEQ ID NO: 246 - protein, 39 aa, Artificial Sequence; identical to SEQ ID NO: 240
  Synthetic Construct
  MISC_FEATURE (2)..(2): Xaa at position 2 is Aib
  MISC_FEATURE (6)..(6): Xaa at position 6 is alpha-methyl-Phe(2F)
  MISC_FEATURE (11)..(11): Xaa at position 11 is Aib
  MISC_FEATURE (13)..(13): Xaa at position 13 is alpha-methyl-Leu
  MISC_FEATURE (16)..(16): Xaa at position 16 is Orn
  MOD_RES (17)..(17): Lys at position 17 is chemically modified by conjugation of the epsilon-amino group of the Lys side chain with (2-[2-(2-amino-ethoxy)-ethoxy]-acetyl)2-(gamma-Glu)-(10-(4-carbox yphenoxy)decanoyl)
  MISC_FEATURE (20)..(20): Xaa at position 20 is Aib
  MOD_RES (21)..(21): Lys at position 21 is chemically modified by conjugation of the epsilon-amino group of the Lys side chain with (2-[2-(2-amino-ethoxy)-ethoxy]-acetyl)2-(gamma-Glu)-(10-(4-carbox yphenoxy)decanoyl)
  MISC_FEATURE (24)..(24): Xaa at position 24 is D-Glu
  MISC_FEATURE (25)..(25): Xaa at position 25 is alpha-methyl-Tyr
  MOD_RES (39)..(39): Ser at position 39 is amidated

SEQ ID NO: 247 - protein, 39 aa, Artificial Sequence; identical to SEQ ID NO: 241
  Synthetic Construct
  MISC_FEATURE (2)..(2): Xaa at position 2 is Aib
  MISC_FEATURE (6)..(6): Xaa at position 6 is alpha-methyl-Phe(2F)
  MISC_FEATURE (11)..(11): Xaa at position 11 is Aib
  MISC_FEATURE (13)..(13): Xaa at position 13 is alpha-methyl-Leu
  MISC_FEATURE (16)..(16): Xaa at position 16 is Orn
  MOD_RES (17)..(17): Lys at position 17 is chemically modified by conjugation of the epsilon-amino group of the Lys side chain with (2-[2-(2-amino-ethoxy)-ethoxy]-acetyl)2-(gamma-Glu)-(10-(4-carbox yphenoxy)decanoyl)
  MISC_FEATURE (20)..(20): Xaa at position 20 is Aib
  MISC_FEATURE (24)..(24): Xaa at position 24 is D-Glu
  MISC_FEATURE (25)..(25): Xaa at position 25 is alpha-methyl-Tyr
  MOD_RES (28)..(28): Lys at position 28 is chemically modified by conjugation of the epsilon-amino group of the Lys side chain with (2-[2-(2-amino-ethoxy)-ethoxy]-acetyl)2-(gamma-Glu)-(10-(4-carbox yphenoxy)decanoyl)
  MOD_RES (39)..(39): Ser at position 39 is amidated

SEQ ID NO: 248 - protein, 40 aa, Artificial Sequence; identical to SEQ ID NO: 242
  Synthetic Construct
  MISC_FEATURE (2)..(2): Xaa at position 2 is Aib
  MISC_FEATURE (6)..(6): Xaa at position 6 is alpha-methyl-Phe(2F)
  MISC_FEATURE (11)..(11): Xaa at position 11 is Aib
  MISC_FEATURE (13)..(13): Xaa at position 13 is alpha-methyl-Leu
  MISC_FEATURE (16)..(16): Xaa at position 16 is Orn
  MOD_RES (17)..(17): Lys at position 17 is chemically modified by conjugation of the epsilon-amino group of the Lys side chain with (2-[2-(2-amino-ethoxy)-ethoxy]-acetyl)2-(gamma-Glu)-(10-(4-carbox yphenoxy)decanoyl)
  MISC_FEATURE (20)..(20): Xaa at position 20 is Aib
  MISC_FEATURE (24)..(24): Xaa at position 24 is D-Glu
  MISC_FEATURE (25)..(25): Xaa at position 25 is alpha-methyl-Tyr
  MOD_RES (40)..(40): Lys at position 40 is chemically modified by conjugation of the epsilon-amino group of the Lys side chain with (2-[2-(2-amino-ethoxy)-ethoxy]-acetyl)2-(gamma-Glu)-(10-(4-carbox yphenoxy)decanoyl)
  MOD_RES (40)..(40): Lys at position 40 is amidated

SEQ ID NO: 249 - protein, 39 aa, Artificial Sequence; identical to SEQ ID NO: 243
  Synthetic Construct
  MISC_FEATURE (2)..(2): Xaa at position 2 is Aib
  MISC_FEATURE (6)..(6): Xaa at position 6 is alpha-methyl-Phe(2F)
  MISC_FEATURE (11)..(11): Xaa at position 11 is Aib
  MISC_FEATURE (13)..(13): Xaa at position 13 is alpha-methyl-Leu
  MISC_FEATURE (16)..(16): Xaa at position 16 is Orn
  MISC_FEATURE (20)..(20): Xaa at position 20 is Aib
  MOD_RES (24)..(24): Lys at position 24 is chemically modified by conjugation of the epsilon-amino group of the Lys side chain with (2-[2-(2-amino-ethoxy)-ethoxy]-acetyl)2-(gamma-Glu)-(10-(4-carbox yphenoxy)decanoyl)
  MISC_FEATURE (25)..(25): Xaa at position 25 is alpha-methyl-Tyr
  MOD_RES (28)..(28): Lys at position 28 is chemically modified by conjugation of the epsilon-amino group of the Lys side chain with (2-[2-(2-amino-ethoxy)-ethoxy]-acetyl)2-(gamma-Glu)-(10-(4-carbox yphenoxy)decanoyl)
  MOD_RES (39)..(39): Ser at position 39 is amidated

SEQ ID NO: 250 - protein, 39 aa, Artificial Sequence; identical to SEQ ID NO: 244
  Synthetic Construct
  MISC_FEATURE (2)..(2): Xaa at position 2 is Aib
  MISC_FEATURE (6)..(6): Xaa at position 6 is alpha-methyl-Phe(2F)
  MISC_FEATURE (11)..(11): Xaa at position 11 is Aib
  MISC_FEATURE (13)..(13): Xaa at position 13 is alpha-methyl-Leu
  MISC_FEATURE (16)..(16): Xaa at position 16 is Orn
  MISC_FEATURE (20)..(20): Xaa at position 20 is Aib
  MOD_RES (21)..(21): Lys at position 21 is chemically modified by conjugation of the epsilon-amino group of the Lys side chain with (2-[2-(2-amino-ethoxy)-ethoxy]-acetyl)2-(gamma-Glu)-(10-(4-carbox yphenoxy)decanoyl)
  MISC_FEATURE (24)..(24): Xaa at position 24 is D-Glu
  MISC_FEATURE (25)..(25): Xaa at position 25 is alpha-methyl-Tyr
  MOD_RES (28)..(28): Lys at position 28 is chemically modified by conjugation of the epsilon-amino group of the Lys side chain with (2-[2-(2-amino-ethoxy)-ethoxy]-acetyl)2-(gamma-Glu)-(10-(4-carbox yphenoxy)decanoyl)
  MOD_RES (39)..(39): Ser at position 39 is amidated

SEQ ID NO: 251 - protein, 40 aa, Artificial Sequence; identical to SEQ ID NO: 245
  Synthetic Construct
  MISC_FEATURE (2)..(2): Xaa at position 2 is Aib
  MISC_FEATURE (6)..(6): Xaa at position 6 is alpha-methyl-Phe(2F)
  MISC_FEATURE (11)..(11): Xaa at position 11 is Aib
  MISC_FEATURE (13)..(13): Xaa at position 13 is alpha-methyl-Leu
  MISC_FEATURE (16)..(16): Xaa at position 16 is Orn
  MISC_FEATURE (20)..(20): Xaa at position 20 is Aib
  MOD_RES (21)..(21): Lys at position 21 is chemically modified by conjugation of the epsilon-amino group of the Lys side chain with (2-[2-(2-amino-ethoxy)-ethoxy]-acetyl)2-(gamma-Glu)-(10-(4-carbox yphenoxy)decanoyl)
  MISC_FEATURE (24)..(24): Xaa at position 24 is D-Glu
  MISC_FEATURE (25)..(25): Xaa at position 25 is alpha-methyl-Tyr
  MOD_RES (40)..(40): Lys at position 40 is chemically modified by conjugation of the epsilon-amino group of the Lys side chain with (2-[2-(2-amino-ethoxy)-ethoxy]-acetyl)2-(gamma-Glu)-(10-(4-carbox yphenoxy)decanoyl)
  MOD_RES (40)..(40): Lys at position 40 is amidated

SEQ ID NO: 252 - protein, 40 aa, Artificial Sequence
  Synthetic Construct
  MISC_FEATURE (2)..(2): Xaa at position 2 is Aib
  MISC_FEATURE (6)..(6): Xaa at position 6 is alpha-methyl-Phe(2F)
  MISC_FEATURE (10)..(10): Xaa at position 10 is 4Pal
  MISC_FEATURE (11)..(11): Xaa at position 11 is Aib
  MISC_FEATURE (13)..(13): Xaa at position 13 is alpha-methyl-Leu
  MISC_FEATURE (16)..(16): Xaa at position 16 is Orn
  MISC_FEATURE (20)..(20): Xaa at position 20 is Aib
  MOD_RES (21)..(21): Lys at position 21 is chemically modified by conjugation of the epsilon-amino group of the Lys side chain with (2-[2-(2-amino-ethoxy)-ethoxy]-acetyl)2-(gamma-Glu)-(11-(4-carbox yphenoxy)undecanoyl
  MISC_FEATURE (24)..(24): Xaa at position 24 is D-Glu
  MISC_FEATURE (25)..(25): Xaa at position 25 is alpha-methyl-Tyr
  MOD_RES (40)..(40): Lys at position 40 is chemically modified by conjugation of the epsilon-amino group of the Lys side chain with (2-[2-(2-amino-ethoxy)-ethoxy]-acetyl)2-(gamma-Glu)-(11-(4-carbox yphenoxy)undecanoyl
  MOD_RES (40)..(40): Lys at position 40 is amidated
YXEGTXTSDXXIXLDXIAQXKFIXXLIEGGPSSGAPPPSK

SEQ ID NO: 253 - protein, 39 aa, Artificial Sequence
  Synthetic Construct
  MISC_FEATURE (2)..(2): Xaa at position 2 is Aib
  MISC_FEATURE (6)..(6): Xaa at position 6 is alpha-methyl-Phe(2F)
  MISC_FEATURE (10)..(10): Xaa at position 10 is 4Pal
  MISC_FEATURE (11)..(11): Xaa at position 11 is Aib
  MISC_FEATURE (13)..(13): Xaa at position 13 is alpha-methyl-Leu
  MISC_FEATURE (16)..(16): Xaa at position 16 is Orn
  MOD_RES (17)..(17): Lys at position 17 is chemically modified by conjugation of the epsilon-amino group of the Lys side chain with (2-[2-(2-amino-ethoxy)-ethoxy]-acetyl)2-(gamma-Glu)-(10-(4-carbox yphenoxy)decanoyl)
  MISC_FEATURE (20)..(20): Xaa at position 20 is Aib
  MOD_RES (21)..(21): Lys at position 21 is chemically modified by conjugation of the epsilon-amino group of the Lys side chain with (2-[2-(2-amino-ethoxy)-ethoxy]-acetyl)2-(gamma-Glu)-(10-(4-carbox yphenoxy)decanoyl
  MISC_FEATURE (24)..(24): Xaa at position 24 is D-Glu
  MISC_FEATURE (25)..(25): Xaa at position 25 is alpha-methyl-Tyr
  MOD_RES (39)..(39): Ser at position 39 is amidated
YXEGTXTSDXXIXLDXKAQXKFIXXLIEGGPSSGAPPPS

SEQ ID NO: 254 - protein, 39 aa, Artificial Sequence
  Synthetic Construct
  MISC_FEATURE (2)..(2): Xaa at position 2 is Aib
  MISC_FEATURE (6)..(6): Xaa at position 6 is alpha-methyl-Phe(2F)
  MISC_FEATURE (10)..(10): Xaa at position 10 is 4Pal
  MISC_FEATURE (11)..(11): Xaa at position 11 is Aib
  MISC_FEATURE (13)..(13): Xaa at position 13 is alpha-methyl-Leu
  MISC_FEATURE (16)..(16): Xaa at position 16 is Orn
  MOD_RES (17)..(17): Lys at position 17 is chemically modified by conjugation of the epsilon-amino group of the Lys side chain with (2-[2-(2-amino-ethoxy)-ethoxy]-acetyl)2-(gamma-Glu)-(10-(4-carbox yphenoxy)decanoyl)
  MISC_FEATURE (20)..(20): Xaa at position 20 is Aib
  MISC_FEATURE (24)..(24): Xaa at position 24 is D-Glu
  MISC_FEATURE (25)..(25): Xaa at position 25 is alpha-methyl-Tyr
  MOD_RES (28)..(28): Lys at position 28 is chemically modified by conjugation of the epsilon-amino group of the Lys side chain with (2-[2-(2-amino-ethoxy)-ethoxy]-acetyl)2-(gamma-Glu)-(10-(4-carbox yphenoxy)decanoyl)
  MOD_RES (39)..(39): Ser at position 39 is amidated
YXEGTXTSDXXIXLDXKAQXEFIXXLIKGGPSSGAPPPS

SEQ ID NO: 255 - protein, 40 aa, Artificial Sequence
  Synthetic Construct
  MISC_FEATURE (2)..(2): Xaa at position 2 is Aib
  MISC_FEATURE (6)..(6): Xaa at position 6 is alpha-methyl-Phe(2F)
  MISC_FEATURE (10)..(10): Xaa at position 10 is 4Pal
  MISC_FEATURE (11)..(11): Xaa at position 11 is Aib
  MISC_FEATURE (13)..(13): Xaa at position 13 is alpha-methyl-Leu
  MISC_FEATURE (16)..(16): Xaa at position 16 is Orn
  MOD_RES (17)..(17): Lys at position 17 is chemically modified by conjugation of the epsilon-amino group of the Lys side chain with (2-[2-(2-amino-ethoxy)-ethoxy]-acetyl)2-(gamma-Glu)-(10-(4-carbox yphenoxy)decanoyl)
  MISC_FEATURE (20)..(20): Xaa at position 20 is Aib
  MISC_FEATURE (24)..(24): Xaa at position 24 is D-Glu
  MISC_FEATURE (25)..(25): Xaa at position 25 is alpha-methyl-Tyr
  MOD_RES (40)..(40): Lys at position 40 is chemically modified by conjugation of the epsilon-amino group of the Lys side chain with (2-[2-(2-amino-ethoxy)-ethoxy]-acetyl)2-(gamma-Glu)-(10-(4-carbox yphenoxy)decanoyl)
  MOD_RES (40)..(40): Lys at position 40 is amidated
YXEGTXTSDXXIXLDXKAQXEFIXXLIEGGPSSGAPPPSK

SEQ ID NO: 256 - protein, 39 aa, Artificial Sequence; identical to SEQ ID NO: 226
  Synthetic Construct
  MISC_FEATURE (2)..(2): Xaa at position 2 is Aib
  MISC_FEATURE (6)..(6): Xaa at position 6 is alpha-methyl-Phe(2F)
  MISC_FEATURE (10)..(10): Xaa at position 10 is 4Pal
  MISC_FEATURE (11)..(11): Xaa at position 11 is Aib
  MISC_FEATURE (13)..(13): Xaa at position 13 is alpha-methyl-Leu
  MISC_FEATURE (16)..(16): Xaa at position 16 is Orn
  MISC_FEATURE (20)..(20): Xaa at position 20 is Aib
  MOD_RES (24)..(24): Lys at position 24 is chemically modified by conjugation of the epsilon-amino group of the Lys side chain with (2-[2-(2-amino-ethoxy)-ethoxy]-acetyl)2-(gamma-Glu)-(10-(4-carbox yphenoxy)decanoyl)
  MISC_FEATURE (25)..(25): Xaa at position 25 is alpha-methyl-Tyr
  MOD_RES (28)..(28): Lys at position 28 is chemically modified by conjugation of the epsilon-amino group of the Lys side chain with (2-[2-(2-amino-ethoxy)-ethoxy]-acetyl)2-(gamma-Glu)-(10-(4-carbox yphenoxy)decanoyl)
  MOD_RES (39)..(39): Ser at position 39 is amidated

SEQ ID NO: 257 - protein, 39 aa, Artificial Sequence; identical to SEQ ID NO: 227
  Synthetic Construct
  MISC_FEATURE (2)..(2): Xaa at position 2 is Aib
  MISC_FEATURE (6)..(6): Xaa at position 6 is alpha-methyl-Phe(2F)
  MISC_FEATURE (10)..(10): Xaa at position 10 is 4Pal
  MISC_FEATURE (11)..(11): Xaa at position 11 is Aib
  MISC_FEATURE (13)..(13): Xaa at position 13 is alpha-methyl-Leu
  MISC_FEATURE (16)..(16): Xaa at position 16 is Orn
  MISC_FEATURE (20)..(20): Xaa at position 20 is Aib
  MOD_RES (21)..(21): Lys at position 21 is chemically modified by conjugation of the epsilon-amino group of the Lys side chain with (2-[2-(2-amino-ethoxy)-ethoxy]-acetyl)2-(gamma-Glu)-(10-(4-carbox yphenoxy)decanoyl)
  MISC_FEATURE (24)..(24): Xaa at position 24 is D-Glu
  MISC_FEATURE (25)..(25): Xaa at position 25 is alpha-methyl-Tyr
  MOD_RES (28)..(28): Lys at position 28 is chemically modified by conjugation of the epsilon-amino group of the Lys side chain with (2-[2-(2-amino-ethoxy)-ethoxy]-acetyl)2-(gamma-Glu)-(10-(4-carbox yphenoxy)decanoyl)
  MOD_RES (39)..(39): Ser at position 39 is amidated

SEQ ID NO: 258 - protein, 40 aa, Artificial Sequence; identical to SEQ ID NO: 252
  Synthetic Construct
  MISC_FEATURE (2)..(2): Xaa at position 2 is Aib
  MISC_FEATURE (6)..(6): Xaa at position 6 is alpha-methyl-Phe(2F)
  MISC_FEATURE (10)..(10): Xaa at position 10 is 4Pal
  MISC_FEATURE (11)..(11): Xaa at position 11 is Aib
  MISC_FEATURE (13)..(13): Xaa at position 13 is alpha-methyl-Leu
  MISC_FEATURE (16)..(16): Xaa at position 16 is Orn
  MISC_FEATURE (20)..(20): Xaa at position 20 is Aib
  MOD_RES (21)..(21): Lys at position 21 is chemically modified by conjugation of the epsilon-amino group of the Lys side chain with (2-[2-(2-amino-ethoxy)-ethoxy]-acetyl)2-(gamma-Glu)-(10-(4-carbox yphenoxy)decanoyl)
  MISC_FEATURE (24)..(24): Xaa at position 24 is D-Glu
  MISC_FEATURE (25)..(25): Xaa at position 25 is alpha-methyl-Tyr
  MOD_RES (40)..(40): Lys at position 40 is chemically modified by conjugation of the epsilon-amino group of the Lys side chain with (2-[2-(2-amino-ethoxy)-ethoxy]-acetyl)2-(gamma-Glu)-(10-(4-carbox yphenoxy)decanoyl)
  MOD_RES (40)..(40): Lys at position 40 is amidated

SEQ ID NO: 259 - protein, 39 aa, Artificial Sequence; identical to SEQ ID NO: 25
  Synthetic Construct
  MISC_FEATURE (2)..(2): Xaa at position 2 is Aib
  MISC_FEATURE (6)..(6): Xaa at position 6 is alpha-methyl-Phe(2F)
  MISC_FEATURE (10)..(10): Xaa at position 10 is 2Nal
  MISC_FEATURE (13)..(13): Xaa at position 13 is alpha-methyl-Leu
  MISC_FEATURE (16)..(16): Xaa at position 16 is Orn
  MOD_RES (17)..(17): Lys at position 17 is chemically modified by conjugation of the epsilon-amino group of the Lys side chain with (2-[2-(2-amino-ethoxy)-ethoxy]-acetyl)2-(gamma-Glu)-CO-(CH2)12-CO 2H
  MISC_FEATURE (20)..(20): Xaa at position 20 is Aib
  MOD_RES (21)..(21): Lys at position 21 is chemically modified by conjugation of the epsilon-amino group of the Lys side chain with (2-[2-(2-amino-ethoxy)-ethoxy]-acetyl)2-(gamma-Glu)-CO-(CH2)12-CO 2H
  MISC_FEATURE (24)..(24): Xaa at position 24 is D-Glu
  MISC_FEATURE (25)..(25): Xaa at position 25 is alpha-methyl-Tyr
  MOD_RES (39)..(39): Ser at position 39 is amidated

SEQ ID NO: 260 - protein, 39 aa, Artificial Sequence; identical to SEQ ID NO: 27
  Synthetic Construct
  MISC_FEATURE (2)..(2): Xaa at position 2 is Aib
  MISC_FEATURE (6)..(6): Xaa at position 6 is alpha-methyl-Phe(2F)
  MISC_FEATURE (10)..(10): Xaa at position 10 is 2Nal
  MISC_FEATURE (13)..(13): Xaa at position 13 is alpha-methyl-Leu
  MISC_FEATURE (16)..(16): Xaa at position 16 is Orn
  MOD_RES (17)..(17): Lys at position 17 is chemically modified by conjugation of the epsilon-amino group of the Lys side chain with (2-[2-(2-amino-ethoxy)-ethoxy]-acetyl)2-(gamma-Glu)-CO-(CH2)12-CO 2H
  MISC_FEATURE (20)..(20): Xaa at position 20 is Aib
  MISC_FEATURE (24)..(24): Xaa at position 24 is D-Glu
  MISC_FEATURE (25)..(25): Xaa at position 25 is alpha-methyl-Tyr
  MOD_RES (28)..(28): Lys at position 28 is chemically modified by conjugation of the epsilon-amino group of the Lys side chain with (2-[2-(2-amino-ethoxy)-ethoxy]-acetyl)2-(gamma-Glu)-CO-(CH2)12-CO 2H
  MOD_RES (39)..(39): Ser at position 39 is amidated

SEQ ID NO: 261 - protein, 40 aa, Artificial Sequence; identical to SEQ ID NO: 29
  Synthetic Construct
  MISC_FEATURE (2)..(2): Xaa at position 2 is Aib
  MISC_FEATURE (6)..(6): Xaa at position 6 is alpha-methyl-Phe(2F)
  MISC_FEATURE (10)..(10): Xaa at position 10 is 2Nal
  MISC_FEATURE (13)..(13): Xaa at position 13 is alpha-methyl-Leu
  MISC_FEATURE (16)..(16): Xaa at position 16 is Orn
  MOD_RES (17)..(17): Lys at position 17 is chemically modified by conjugation of the epsilon-amino group of the Lys side chain with (2-[2-(2-amino-ethoxy)-ethoxy]-acetyl)2-(gamma-Glu)-CO-(CH2)12-CO 2H
  MISC_FEATURE (20)..(20): Xaa at position 20 is Aib
  MISC_FEATURE (24)..(24): Xaa at position 24 is D-Glu
  MISC_FEATURE (25)..(25): Xaa at position 25 is alpha-methyl-Tyr
  MOD_RES (40)..(40): Lys at position 40 is chemically modified by conjugation of the epsilon-amino group of the Lys side chain with (2-[2-(2-amino-ethoxy)-ethoxy]-acetyl)2-(gamma-Glu)-CO-(CH2)12-CO 2H
  MOD_RES (40)..(40): Lys at position 40 is amidated

SEQ ID NO: 262 - protein, 39 aa, Artificial Sequence; identical to SEQ ID NO: 80
  Synthetic Construct
  MISC_FEATURE (2)..(2): Xaa at position 2 is Aib
  MISC_FEATURE (6)..(6): Xaa at position 6 is alpha-methyl-Phe(2F)
  MISC_FEATURE (10)..(10): Xaa at position 10 is 2Nal
  MISC_FEATURE (13)..(13): Xaa at position 13 is alpha-methyl-Leu
  MISC_FEATURE (16)..(16): Xaa at position 16 is Orn
  MISC_FEATURE (20)..(20): Xaa at position 20 is Aib
  MOD_RES (24)..(24): Lys at position 24 is chemically modified by conjugation of the epsilon-amino group of the Lys side chain with (2-[2-(2-amino-ethoxy)-ethoxy]-acetyl)2-(gamma-Glu)-CO-(CH2)12-CO 2H
  MISC_FEATURE (25)..(25): Xaa at position 25 is alpha-methyl-Tyr
  MOD_RES (28)..(28): Lys at position 28 is chemically modified by conjugation of the epsilon-amino group of the Lys side chain with (2-[2-(2-amino-ethoxy)-ethoxy]-acetyl)2-(gamma-Glu)-CO-(CH2)12-CO 2H
  MOD_RES (39)..(39): Ser at position 39 is amidated

SEQ ID NO: 263 - protein, 39 aa, Artificial Sequence; identical to SEQ ID NO: 83
  Synthetic Construct
  MISC_FEATURE (2)..(2): Xaa at position 2 is Aib
  MISC_FEATURE (6)..(6): Xaa at position 6 is alpha-methyl-Phe(2F)
  MISC_FEATURE (10)..(10): Xaa at position 10 is 2Nal
  MISC_FEATURE (13)..(13): Xaa at position 13 is alpha-methyl-Leu
  MISC_FEATURE (16)..(16): Xaa at position 16 is Orn
  MISC_FEATURE (20)..(20): Xaa at position 20 is Aib
  MOD_RES (21)..(21): Lys at position 21 is chemically modified by conjugation of the epsilon-amino group of the Lys side chain with (2-[2-(2-amino-ethoxy)-ethoxy]-acetyl)2-(gamma-Glu)-CO-(CH2)12-CO 2H
  MISC_FEATURE (24)..(24): Xaa at position 24 is D-Glu
  MISC_FEATURE (25)..(25): Xaa at position 25 is alpha-methyl-Tyr
  MOD_RES (28)..(28): Lys at position 28 is chemically modified by conjugation of the epsilon-amino group of the Lys side chain with (2-[2-(2-amino-ethoxy)-ethoxy]-acetyl)2-(gamma-Glu)-CO-(CH2)12-CO 2H
  MOD_RES (39)..(39): Ser at position 39 is amidated

SEQ ID NO: 264 - protein, 40 aa, Artificial Sequence; identical to SEQ ID NO: 85
  Synthetic Construct
  MISC_FEATURE (2)..(2): Xaa at position 2 is Aib
  MISC_FEATURE (6)..(6): Xaa at position 6 is alpha-methyl-Phe(2F)
  MISC_FEATURE (10)..(10): Xaa at position 10 is 2Nal
  MISC_FEATURE (13)..(13): Xaa at position 13 is alpha-methyl-Leu
  MISC_FEATURE (16)..(16): Xaa at position 16 is Orn
  MISC_FEATURE (20)..(20): Xaa at position 20 is Aib
  MOD_RES (21)..(21): Lys at position 21 is chemically modified by conjugation of the epsilon-amino group of the Lys side chain with (2-[2-(2-amino-ethoxy)-ethoxy]-acetyl)2-(gamma-Glu)-CO-(CH2)12-CO 2H
  MISC_FEATURE (24)..(24): Xaa at position 24 is D-Glu
  MISC_FEATURE (25)..(25): Xaa at position 25 is alpha-methyl-Tyr
  MOD_RES (40)..(40): Lys at position 40 is chemically modified by conjugation of the epsilon-amino group of the Lys side chain with (2-[2-(2-amino-ethoxy)-ethoxy]-acetyl)2-(gamma-Glu)-CO-(CH2)12-CO 2H
  MOD_RES (40)..(40): Lys at position 40 is amidated

SEQ ID NO: 265 - protein, 39 aa, Artificial Sequence; identical to SEQ ID NO: 25
  Synthetic Construct
  MISC_FEATURE (2)..(2): Xaa at position 2 is Aib
  MISC_FEATURE (6)..(6): Xaa at position 6 is alpha-methyl-Phe(2F)
  MISC_FEATURE (10)..(10): Xaa at position 10 is 2Nal
  MISC_FEATURE (13)..(13): Xaa at position 13 is alpha-methyl-Leu
  MISC_FEATURE (16)..(16): Xaa at position 16 is Orn
  MOD_RES (17)..(17): Lys at position 17 is chemically modified by conjugation of the epsilon-amino group of the Lys side chain with (2-[2-(2-amino-ethoxy)-ethoxy]-acetyl)2-CO-(CH2)12-CO2H
  MISC_FEATURE (20)..(20): Xaa at position 20 is Aib
  MOD_RES (21)..(21): Lys at position 21 is chemically modified by conjugation of the epsilon-amino group of the Lys side chain with (2-[2-(2-amino-ethoxy)-ethoxy]-acetyl)2-CO-(CH2)12-CO2H
  MISC_FEATURE (24)..(24): Xaa at position 24 is D-Glu
  MISC_FEATURE (25)..(25): Xaa at position 25 is alpha-methyl-Tyr
  MOD_RES (39)..(39): Ser at position 39 is amidated

SEQ ID NO: 266 - protein, 39 aa, Artificial Sequence; identical to SEQ ID NO: 27
  Synthetic Construct
  MISC_FEATURE (2)..(2): Xaa at position 2 is Aib
  MISC_FEATURE (6)..(6): Xaa at position 6 is alpha-methyl-Phe(2F)
  MISC_FEATURE (10)..(10): Xaa at position 10 is 2Nal
  MISC_FEATURE (13)..(13): Xaa at position 13 is alpha-methyl-Leu
  MISC_FEATURE (16)..(16): Xaa at position 16 is Orn
  MOD_RES (17)..(17): Lys at position 17 is chemically modified by conjugation of the epsilon-amino group of the Lys side chain with (2-[2-(2-amino-ethoxy)-ethoxy]-acetyl)2-CO-(CH2)12-CO2H
  MISC_FEATURE (20)..(20): Xaa at position 20 is Aib
  MISC_FEATURE (24)..(24): Xaa at position 24 is D-Glu
  MISC_FEATURE (25)..(25): Xaa at position 25 is alpha-methyl-Tyr
  MOD_RES (28)..(28): Lys at position 28 is chemically modified by conjugation of the epsilon-amino group of the Lys side chain with (2-[2-(2-amino-ethoxy)-ethoxy]-acetyl)2-CO-(CH2)12-CO2H
  MOD_RES (39)..(39): Ser at position 39 is amidated

SEQ ID NO: 267 - protein, 40 aa, Artificial Sequence; identical to SEQ ID NO: 29
  Synthetic Construct
  MISC_FEATURE (2)..(2): Xaa at position 2 is Aib
  MISC_FEATURE (6)..(6): Xaa at position 6 is alpha-methyl-Phe(2F)
  MISC_FEATURE (10)..(10): Xaa at position 10 is 2Nal
  MISC_FEATURE (13)..(13): Xaa at position 13 is alpha-methyl-Leu
  MISC_FEATURE (16)..(16): Xaa at position 16 is Orn
  MOD_RES (17)..(17): Lys at position 17 is chemically modified by conjugation of the epsilon-amino group of the Lys side chain with (2-[2-(2-amino-ethoxy)-ethoxy]-acetyl)2-CO-(CH2)12-CO2H
  MISC_FEATURE (20)..(20): Xaa at position 20 is Aib
  MISC_FEATURE (24)..(24): Xaa at position 24 is D-Glu
  MISC_FEATURE (25)..(25): Xaa at position 25 is alpha-methyl-Tyr
  MOD_RES (40)..(40): Lys at position 40 is chemically modified by conjugation of the epsilon-amino group of the Lys side chain with (2-[2-(2-amino-ethoxy)-ethoxy]-acetyl)2-CO-(CH2)12-CO2H
  MOD_RES (40)..(40): Lys at position 40 is amidated

SEQ ID NO: 268 - protein, 40 aa, Artificial Sequence; identical to SEQ ID NO: 85
  Synthetic Construct
  MISC_FEATURE (2)..(2): Xaa at position 2 is Aib
  MISC_FEATURE (6)..(6): Xaa at position 6 is alpha-methyl-Phe(2F)
  MISC_FEATURE (10)..(10): Xaa at position 10 is 2Nal
  MISC_FEATURE (13)..(13): Xaa at position 13 is alpha-methyl-Leu
  MISC_FEATURE (16)..(16): Xaa at position 16 is Orn
  MISC_FEATURE (20)..(20): Xaa at position 20 is Aib
  MOD_RES (21)..(21): Lys at position 21 is chemically modified by conjugation of the epsilon-amino group of the Lys side chain with (2-[2-(2-amino-ethoxy)-ethoxy]-acetyl)2-CO-(CH2)12-CO2H
  MISC_FEATURE (24)..(24): Xaa at position 24 is D-Glu
  MISC_FEATURE (25)..(25): Xaa at position 25 is alpha-methyl-Tyr
  MOD_RES (40)..(40): Lys at position 40 is chemically modified by conjugation of the epsilon-amino group of the Lys side chain with (2-[2-(2-amino-ethoxy)-ethoxy]-acetyl)2-CO-(CH2)12-CO2H
  MOD_RES (40)..(40): Lys at position 40 is amidated

SEQ ID NO: 269 - protein, 39 aa, Artificial Sequence; identical to SEQ ID NO: 25
  Synthetic Construct
  MISC_FEATURE (2)..(2): Xaa at position 2 is Aib
  MISC_FEATURE (6)..(6): Xaa at position 6 is alpha-methyl-Phe(2F)
  MISC_FEATURE (10)..(10): Xaa at position 10 is OMeY
  MISC_FEATURE (13)..(13): Xaa at position 13 is alpha-methyl-Leu
  MISC_FEATURE (16)..(16): Xaa at position 16 is Orn
  MOD_RES (17)..(17): Lys at position 17 is chemically modified by conjugation of the epsilon-amino group of the Lys side chain with (2-[2-(2-amino-ethoxy)-ethoxy]-acetyl)2-(gamma-Glu)-CO-(CH2)12-CO 2H
  MISC_FEATURE (20)..(20): Xaa at position 20 is Aib
  MOD_RES (21)..(21): Lys at position 21 is chemically modified by conjugation of the epsilon-amino group of the Lys side chain with (2-[2-(2-amino-ethoxy)-ethoxy]-acetyl)2-(gamma-Glu)-CO-(CH2)12-CO 2H
  MISC_FEATURE (24)..(24): Xaa at position 24 is D-Glu
  MISC_FEATURE (25)..(25): Xaa at position 25 is alpha-methyl-Tyr
  MOD_RES (39)..(39): Ser at position 39 is amidated

SEQ ID NO: 270 - protein, 39 aa, Artificial Sequence; identical to SEQ ID NO: 27
  Synthetic Construct
  MISC_FEATURE (2)..(2): Xaa at position 2 is Aib
  MISC_FEATURE (6)..(6): Xaa at position 6 is alpha-methyl-Phe(2F)
  MISC_FEATURE (10)..(10): Xaa at position 10 is OMeY
  MISC_FEATURE (13)..(13): Xaa at position 13 is alpha-methyl-Leu
  MISC_FEATURE (16)..(16): Xaa at position 16 is Orn
  MOD_RES (17)..(17): Lys at position 17 is chemically modified by conjugation of the epsilon-amino group of the Lys side chain with (2-[2-(2-amino-ethoxy)-ethoxy]-acetyl)2-(gamma-Glu)-CO-(CH2)12-CO 2H
  MISC_FEATURE (20)..(20): Xaa at position 20 is Aib
  MISC_FEATURE (24)..(24): Xaa at position 24 is D-Glu
  MISC_FEATURE (25)..(25): Xaa at position 25 is alpha-methyl-Tyr
  MOD_RES (28)..(28): Lys at position 28 is chemically modified by conjugation of the epsilon-amino group of the Lys side chain with (2-[2-(2-amino-ethoxy)-ethoxy]-acetyl)2-(gamma-Glu)-CO-(CH2)12-CO 2H
  MOD_RES (39)..(39): Ser at position 39 is amidated

SEQ ID NO: 271 - protein, 40 aa, Artificial Sequence; identical to SEQ ID NO: 29
  Synthetic Construct
  MISC_FEATURE (2)..(2): Xaa at position 2 is Aib
  MISC_FEATURE (6)..(6): Xaa at position 6 is alpha-methyl-Phe(2F)
  MISC_FEATURE (10)..(10): Xaa at position 10 is OMeY
  MISC_FEATURE (13)..(13): Xaa at position 13 is alpha-methyl-Leu
  MISC_FEATURE (16)..(16): Xaa at position 16 is Orn
  MOD_RES (17)..(17): Lys at position 17 is chemically modified by conjugation of the epsilon-amino group of the Lys side chain with (2-[2-(2-amino-ethoxy)-ethoxy]-acetyl)2-(gamma-Glu)-CO-(CH2)12-CO 2H
  MISC_FEATURE (20)..(20): Xaa at position 20 is Aib
  MISC_FEATURE (24)..(24): Xaa at position 24 is D-Glu
  MISC_FEATURE (25)..(25): Xaa at position 25 is alpha-methyl-Tyr
  MOD_RES (40)..(40): Lys at position 40 is chemically modified by conjugation of the epsilon-amino group of the Lys side chain with (2-[2-(2-amino-ethoxy)-ethoxy]-acetyl)2-(gamma-Glu)-CO-(CH2)12-CO 2H
  MOD_RES (40)..(40): Lys at position 40 is amidated

SEQ ID NO: 272 - protein, 39 aa, Artificial Sequence; identical to SEQ ID NO: 80
  Synthetic Construct
  MISC_FEATURE (2)..(2): Xaa at position 2 is Aib
  MISC_FEATURE (6)..(6): Xaa at position 6 is alpha-methyl-Phe(2F)
  MISC_FEATURE (10)..(10): Xaa at position 10 is OMeY
  MISC_FEATURE (13)..(13): Xaa at position 13 is alpha-methyl-Leu
  MISC_FEATURE (16)..(16): Xaa at position 16 is Orn
  MISC_FEATURE (20)..(20): Xaa at position 20 is Aib
  MOD_RES (24)..(24): Lys at position 24 is chemically modified by conjugation of the epsilon-amino group of the Lys side chain with (2-[2-(2-amino-ethoxy)-ethoxy]-acetyl)2-(gamma-Glu)-CO-(CH2)12-CO 2H
  MISC_FEATURE (25)..(25): Xaa at position 25 is alpha-methyl-Tyr
  MOD_RES (28)..(28): Lys at position 28 is chemically modified by conjugation of the epsilon-amino group of the Lys side chain with (2-[2-(2-amino-ethoxy)-ethoxy]-acetyl)2-(gamma-Glu)-CO-(CH2)12-CO 2H
  MOD_RES (39)..(39): Ser at position 39 is amidated

SEQ ID NO: 273 - protein, 39 aa, Artificial Sequence; identical to SEQ ID NO: 83
  Synthetic Construct
  MISC_FEATURE (2)..(2): Xaa at position 2 is Aib
  MISC_FEATURE (6)..(6): Xaa at position 6 is alpha-methyl-Phe(2F)
  MISC_FEATURE (10)..(10): Xaa at position 10 is OMeY
  MISC_FEATURE (13)..(13): Xaa at position 13 is alpha-methyl-Leu
  MISC_FEATURE (16)..(16): Xaa at position 16 is Orn
  MISC_FEATURE (20)..(20): Xaa at position 20 is Aib
  MOD_RES (21)..(21): Lys at position 21 is chemically modified by conjugation of the epsilon-amino group of the Lys side chain with (2-[2-(2-amino-ethoxy)-ethoxy]-acetyl)2-(gamma-Glu)-CO-(CH2)12-CO 2H
  MISC_FEATURE (24)..(24): Xaa at position 24 is D-Glu
  MISC_FEATURE (25)..(25): Xaa at position 25 is alpha-methyl-Tyr
  MOD_RES (28)..(28): Lys at position 28 is chemically modified by conjugation of the epsilon-amino group of the Lys side chain with (2-[2-(2-amino-ethoxy)-ethoxy]-acetyl)2-(gamma-Glu)-CO-(CH2)12-CO 2H
  MOD_RES (39)..(39): Ser at position 39 is amidated

SEQ ID NO: 274 - protein, 40 aa, Artificial Sequence; identical to SEQ ID NO: 85
  Synthetic Construct
  MISC_FEATURE (2)..(2): Xaa at position 2 is Aib
  MISC_FEATURE (6)..(6): Xaa at position 6 is alpha-methyl-Phe(2F)
  MISC_FEATURE (10)..(10): Xaa at position 10 is OMeY
  MISC_FEATURE (13)..(13): Xaa at position 13 is alpha-methyl-Leu
  MISC_FEATURE (16)..(16): Xaa at position 16 is Orn
  MISC_FEATURE (20)..(20): Xaa at position 20 is Aib
  MOD_RES (21)..(21): Lys at position 21 is chemically modified by conjugation of the epsilon-amino group of the Lys side chain with (2-[2-(2-amino-ethoxy)-ethoxy]-acetyl)2-(gamma-Glu)-CO-(CH2)12-CO 2H
  MISC_FEATURE (24)..(24): Xaa at position 24 is D-Glu
  MISC_FEATURE (25)..(25): Xaa at position 25 is alpha-methyl-Tyr
  MOD_RES (40)..(40): Lys at position 40 is chemically modified by conjugation of the epsilon-amino group of the Lys side chain with (2-[2-(2-amino-ethoxy)-ethoxy]-acetyl)2-(gamma-Glu)-CO-(CH2)12-CO 2H
  MOD_RES (40)..(40): Lys at position 40 is amidated

SEQ ID NO: 275 - protein, 39 aa, Artificial Sequence; identical to SEQ ID NO: 25
  Synthetic Construct
  MISC_FEATURE (2)..(2): Xaa at position 2 is Aib
  MISC_FEATURE (6)..(6): Xaa at position 6 is alpha-methyl-Phe(2F)
  MISC_FEATURE (10)..(10): Xaa at position 10 is OMeY
  MISC_FEATURE (13)..(13): Xaa at position 13 is alpha-methyl-Leu
  MISC_FEATURE (16)..(16): Xaa at position 16 is Orn
  MOD_RES (17)..(17): Lys at position 17 is chemically modified by conjugation of the epsilon-amino group of the Lys side chain with (2-[2-(2-amino-ethoxy)-ethoxy]-acetyl)2-CO-(CH2)12-CO2H
  MISC_FEATURE (20)..(20): Xaa at position 20 is Aib
  MOD_RES (21)..(21): Lys at position 21 is chemically modified by conjugation of the epsilon-amino group of the Lys side chain with (2-[2-(2-amino-ethoxy)-ethoxy]-acetyl)2-CO-(CH2)12-CO2H
  MISC_FEATURE (24)..(24): Xaa at position 24 is D-Glu
  MISC_FEATURE (25)..(25): Xaa at position 25 is alpha-methyl-Tyr
  MOD_RES (39)..(39): Ser at position 39 is amidated

SEQ ID NO: 276 - protein, 39 aa, Artificial Sequence; identical to SEQ ID NO: 27
  Synthetic Construct
  MISC_FEATURE (2)..(2): Xaa at position 2 is Aib
  MISC_FEATURE (6)..(6): Xaa at position 6 is alpha-methyl-Phe(2F)
  MISC_FEATURE (10)..(10): Xaa at position 10 is OMeY
  MISC_FEATURE (13)..(13): Xaa at position 13 is alpha-methyl-Leu
  MISC_FEATURE (16)..(16): Xaa at position 16 is Orn
  MOD_RES (17)..(17): Lys at position 17 is chemically modified by conjugation of the epsilon-amino group of the Lys side chain with (2-[2-(2-amino-ethoxy)-ethoxy]-acetyl)2-CO-(CH2)12-CO2H
  MISC_FEATURE (20)..(20): Xaa at position 20 is Aib
  MISC_FEATURE (24)..(24): Xaa at position 24 is D-Glu
  MISC_FEATURE (25)..(25): Xaa at position 25 is alpha-methyl-Tyr
  MOD_RES (28)..(28): Lys at position 28 is chemically modified by conjugation of the epsilon-amino group of the Lys side chain with (2-[2-(2-amino-ethoxy)-ethoxy]-acetyl)2-CO-(CH2)12-CO2H
  MOD_RES (39)..(39): Ser at position 39 is amidated

SEQ ID NO: 277 - protein, 40 aa, Artificial Sequence; identical to SEQ ID NO: 29
  Synthetic Construct
  MISC_FEATURE (2)..(2): Xaa at position 2 is Aib
  MISC_FEATURE (6)..(6): Xaa at position 6 is alpha-methyl-Phe(2F)
  MISC_FEATURE (10)..(10): Xaa at position 10 is OMeY
  MISC_FEATURE (13)..(13): Xaa at position 13 is alpha-methyl-Leu
  MISC_FEATURE (16)..(16): Xaa at position 16 is Orn
  MOD_RES (17)..(17): Lys at position 17 is chemically modified by conjugation of the epsilon-amino group of the Lys side chain with (2-[2-(2-amino-ethoxy)-ethoxy]-acetyl)2-CO-(CH2)12-CO2H
  MISC_FEATURE (20)..(20): Xaa at position 20 is Aib
  MISC_FEATURE (24)..(24): Xaa at position 24 is D-Glu
  MISC_FEATURE (25)..(25): Xaa at position 25 is alpha-methyl-Tyr
  MOD_RES (40)..(40): Lys at position 40 is chemically modified by conjugation of the epsilon-amino group of the Lys side chain with (2-[2-(2-amino-ethoxy)-ethoxy]-acetyl)2-CO-(CH2)12-CO2H
  MOD_RES (40)..(40): Lys at position 40 is amidated

SEQ ID NO: 278 - protein, 40 aa, Artificial Sequence; identical to SEQ ID NO: 85
  Synthetic Construct
  MISC_FEATURE (2)..(2): Xaa at position 2 is Aib
  MISC_FEATURE (6)..(6): Xaa at position 6 is alpha-methyl-Phe(2F)
  MISC_FEATURE (10)..(10): Xaa at position 10 is OMeY
  MISC_FEATURE (13)..(13): Xaa at position 13 is alpha-methyl-Leu
  MISC_FEATURE (16)..(16): Xaa at position 16 is Orn
  MISC_FEATURE (20)..(20): Xaa at position 20 is Aib
  MOD_RES (21)..(21): Lys at position 21 is chemically modified by conjugation of the epsilon-amino group of the Lys side chain with (2-[2-(2-amino-ethoxy)-ethoxy]-acetyl)2-CO-(CH2)12-CO2H
  MISC_FEATURE (24)..(24): Xaa at position 24 is D-Glu
  MISC_FEATURE (25)..(25): Xaa at position 25 is alpha-methyl-Tyr
  MOD_RES (40)..(40): Lys at position 40 is chemically modified by conjugation of the epsilon-amino group of the Lys side chain with (2-[2-(2-amino-ethoxy)-ethoxy]-acetyl)2-CO-(CH2)12-CO2H
  MOD_RES (40)..(40): Lys at position 40 is amidated

SEQ ID NO: 279 - protein, 39 aa, Artificial Sequence; identical to SEQ ID NO: 80
  Synthetic Construct
  MISC_FEATURE (2)..(2): Xaa at position 2 is Aib
  MISC_FEATURE (6)..(6): Xaa at position 6 is alpha-methyl-Phe(2F)
  MISC_FEATURE (10)..(10): Xaa at position 10 is Nle
  MISC_FEATURE (13)..(13): Xaa at position 13 is alpha-methyl-Leu
  MISC_FEATURE (16)..(16): Xaa at position 16 is Orn
  MISC_FEATURE (20)..(20): Xaa at position 20 is Aib
  MOD_RES (24)..(24): Lys at position 24 is chemically modified by conjugation of the epsilon-amino group of the Lys side chain with (2-[2-(2-amino-ethoxy)-ethoxy]-acetyl)2-(gamma-Glu)-CO-(CH2)12-CO 2H
  MISC_FEATURE (25)..(25): Xaa at position 25 is alpha-methyl-Tyr
  MOD_RES (28)..(28): Lys at position 28 is chemically modified by conjugation of the epsilon-amino group of the Lys side chain with (2-[2-(2-amino-ethoxy)-ethoxy]-acetyl)2-(gamma-Glu)-CO-(CH2)12-CO 2H
  MOD_RES (39)..(39): Ser at position 39 is amidated

SEQ ID NO: 280 - protein, 39 aa, Artificial Sequence; identical to SEQ ID NO: 80
  Synthetic Construct
  MISC_FEATURE (2)..(2): Xaa at position 2 is Aib
  MISC_FEATURE (6)..(6): Xaa at position 6 is alpha-methyl-Phe(2F)
  MISC_FEATURE (10)..(10): Xaa at position 10 is hTyr
  MISC_FEATURE (13)..(13): Xaa at position 13 is alpha-methyl-Leu
  MISC_FEATURE (16)..(16): Xaa at position 16 is Orn
  MISC_FEATURE (20)..(20): Xaa at position 20 is Aib
  MOD_RES (24)..(24): Lys at position 24 is chemically modified by conjugation of the epsilon-amino group of the Lys side chain with (2-[2-(2-amino-ethoxy)-ethoxy]-acetyl)2-(gamma-Glu)-CO-(CH2)12-CO 2H
  MISC_FEATURE (25)..(25): Xaa at position 25 is alpha-methyl-Tyr
  MOD_RES (28)..(28): Lys at position 28 is chemically modified by conjugation of the epsilon-amino group of the Lys side chain with (2-[2-(2-amino-ethoxy)-ethoxy]-acetyl)2-(gamma-Glu)-CO-(CH2)12-CO 2H
  MOD_RES (39)..(39): Ser at position 39 is amidated

SEQ ID NO: 281 - protein, 39 aa, Artificial Sequence; identical to SEQ ID NO: 25
  Synthetic Construct
  MISC_FEATURE (2)..(2): Xaa at position 2 is Aib
  MISC_FEATURE (6)..(6): Xaa at position 6 is alpha-methyl-Phe(2F)
  MISC_FEATURE (10)..(10): Xaa at position 10 is Nle
  MISC_FEATURE (13)..(13): Xaa at position 13 is alpha-methyl-Leu
  MISC_FEATURE (16)..(16): Xaa at position 16 is Orn
  MOD_RES (17)..(17): Lys at position 17 is chemically modified by conjugation of the epsilon-amino group of the Lys side chain with (2-[2-(2-amino-ethoxy)-ethoxy]-acetyl)2-CO-(CH2)12-CO2H
  MISC_FEATURE (20)..(20): Xaa at position 20 is Aib
  MOD_RES (21)..(21): Lys at position 21 is chemically modified by conjugation of the epsilon-amino group of the Lys side chain with (2-[2-(2-amino-ethoxy)-ethoxy]-acetyl)2-CO-(CH2)12-CO2H
  MISC_FEATURE (24)..(24): Xaa at position 24 is D-Glu
  MISC_FEATURE (25)..(25): Xaa at position 25 is alpha-methyl-Tyr
  MOD_RES (39)..(39): Ser at position 39 is amidated

SEQ ID NO: 282 - protein, 39 aa, Artificial Sequence; identical to SEQ ID NO: 25
  Synthetic Construct
  MISC_FEATURE (2)..(2): Xaa at position 2 is Aib
  MISC_FEATURE (6)..(6): Xaa at position 6 is alpha-methyl-Phe(2F)
  MISC_FEATURE (10)..(10): Xaa at position 10 is hTyr
  MISC_FEATURE (13)..(13): Xaa at position 13 is alpha-methyl-Leu
  MISC_FEATURE (16)..(16): Xaa at position 16 is Orn
  MOD_RES (17)..(17): Lys at position 17 is chemically modified by conjugation of the epsilon-amino group of the Lys side chain with (2-[2-(2-amino-ethoxy)-ethoxy]-acetyl)2-CO-(CH2)12-CO2H
  MISC_FEATURE (20)..(20): Xaa at position 20 is Aib
  MOD_RES (21)..(21): Lys at position 21 is chemically modified by conjugation of the epsilon-amino group of the Lys side chain with (2-[2-(2-amino-ethoxy)-ethoxy]-acetyl)2-CO-(CH2)12-CO2H
  MISC_FEATURE (24)..(24): Xaa at position 24 is D-Glu
  MISC_FEATURE (25)..(25): Xaa at position 25 is alpha-methyl-Tyr
  MOD_RES (39)..(39): Ser at position 39 is amidated

SEQ ID NO: 283 - protein, 40 aa, Artificial Sequence; identical to SEQ ID NO: 29
  Synthetic Construct
  MISC_FEATURE (2)..(2): Xaa at position 2 is Aib
  MISC_FEATURE (6)..(6): Xaa at position 6 is alpha-methyl-Phe(2F)
  MISC_FEATURE (10)..(10): Xaa at position 10 is 4Pal
  MISC_FEATURE (13)..(13): Xaa at position 13 is alpha-methyl-Leu
  MISC_FEATURE (16)..(16): Xaa at position 16 is Orn
  MOD_RES (17)..(17): Lys at position 17 is chemically modified by conjugation of the epsilon-amino group of the Lys side chain with (2-[2-(2-amino-ethoxy)-ethoxy]-acetyl)2-(gamma-Glu)-(10-(4-carbox yphenoxy)decanoyl)
  MISC_FEATURE (20)..(20): Xaa at position 20 is Aib
  MISC_FEATURE (24)..(24): Xaa at position 24 is D-Glu
  MISC_FEATURE (25)..(25): Xaa at position 25 is alpha-methyl-Tyr
  MOD_RES (40)..(40): Lys at position 40 is chemically modified by conjugation of the epsilon-amino group of the Lys side chain with (2-[2-(2-amino-ethoxy)-ethoxy]-acetyl)2-(gamma-Glu)-(10-(4-carbox yphenoxy)decanoyl)
  MOD_RES (40)..(40): Lys at position 40 is amidated

SEQ ID NO: 284 - protein, 39 aa, Artificial Sequence; identical to SEQ ID NO: 80
  Synthetic Construct
  MISC_FEATURE (2)..(2): Xaa at position 2 is Aib
  MISC_FEATURE (6)..(6): Xaa at position 6 is alpha-methyl-Phe(2F)
  MISC_FEATURE (10)..(10): Xaa at position 10 is 4Pal
  MISC_FEATURE (13)..(13): Xaa at position 13 is alpha-methyl-Leu
  MISC_FEATURE (16)..(16): Xaa at position 16 is Orn
  MISC_FEATURE (20)..(20): Xaa at position 20 is Aib
  MOD_RES (24)..(24): Lys at position 24 is chemically modified by conjugation of the epsilon-amino group of the Lys side chain with (2-[2-(2-amino-ethoxy)-ethoxy]-acetyl)2-(gamma-Glu)-(10-(4-carbox yphenoxy)decanoyl)
  MISC_FEATURE (25)..(25): Xaa at position 25 is alpha-methyl-Tyr
  MOD_RES (28)..(28): Lys at position 28 is chemically modified by conjugation of the epsilon-amino group of the Lys side chain with (2-[2-(2-amino-ethoxy)-ethoxy]-acetyl)2-(gamma-Glu)-(10-(4-carbox yphenoxy)decanoyl)
  MOD_RES (39)..(39): Ser at position 39 is amidated

SEQ ID NO: 285 - protein, 39 aa, Artificial Sequence; identical to SEQ ID NO: 83
  Synthetic Construct
  MISC_FEATURE (2)..(2): Xaa at position 2 is Aib
  MISC_FEATURE (6)..(6): Xaa at position 6 is alpha-methyl-Phe(2F)
  MISC_FEATURE (10)..(10): Xaa at position 10 is 4Pal
  MISC_FEATURE (13)..(13): Xaa at position 13 is alpha-methyl-Leu
  MISC_FEATURE (16)..(16): Xaa at position 16 is Orn
  MISC_FEATURE (20)..(20): Xaa at position 20 is Aib
  MOD_RES (21)..(21): Lys at position 21 is chemically modified by conjugation of the epsilon-amino group of the Lys side chain with (2-[2-(2-amino-ethoxy)-ethoxy]-acetyl)2-(gamma-Glu)-(10-(4-carbox yphenoxy)decanoyl)
  MISC_FEATURE (24)..(24): Xaa at position 24 is D-Glu
  MISC_FEATURE (25)..(25): Xaa at position 25 is alpha-methyl-Tyr
  MOD_RES (28)..(28): Lys at position 28 is chemically modified by conjugation of the epsilon-amino group of the Lys side chain with (2-[2-(2-amino-ethoxy)-ethoxy]-acetyl)2-(gamma-Glu)-(10-(4-carbox yphenoxy)decanoyl)
  MOD_RES (39)..(39): Ser at position 39 is amidated

SEQ ID NO: 286 - protein, 40 aa, Artificial Sequence; identical to SEQ ID NO: 85
  Synthetic Construct
  MISC_FEATURE (2)..(2): Xaa at position 2 is Aib
  MISC_FEATURE (6)..(6): Xaa at position 6 is alpha-methyl-Phe(2F)
  MISC_FEATURE (10)..(10): Xaa at position 10 is 4Pal
  MISC_FEATURE (13)..(13): Xaa at position 13 is alpha-methyl-Leu
  MISC_FEATURE (16)..(16): Xaa at position 16 is Orn
  MISC_FEATURE (20)..(20): Xaa at position 20 is Aib
  MOD_RES (21)..(21): Lys at position 21 is chemically modified by conjugation of the epsilon-amino group of the Lys side chain with (2-[2-(2-amino-ethoxy)-ethoxy]-acetyl)2-(gamma-Glu)-(10-(4-carbox yphenoxy)decanoyl)
  MISC_FEATURE (24)..(24): Xaa at position 24 is D-Glu
  MISC_FEATURE (25)..(25): Xaa at position 25 is alpha-methyl-Tyr
  MOD_RES (40)..(40): Lys at position 40 is chemically modified by conjugation of the epsilon-amino group of the Lys side chain with (2-[2-(2-amino-ethoxy)-ethoxy]-acetyl)2-(gamma-Glu)-(10-(4-carbox yphenoxy)decanoyl)
  MOD_RES (40)..(40): Lys at position 40 is amidated

SEQ ID NO: 287 - protein, 39 aa, Artificial Sequence; identical to SEQ ID NO: 25
  Synthetic Construct
  MISC_FEATURE (2)..(2): Xaa at position 2 is Aib
  MISC_FEATURE (6)..(6): Xaa at position 6 is alpha-methyl-Phe(2F)
  MISC_FEATURE (10)..(10): Xaa at position 10 is OMeY
  MISC_FEATURE (13)..(13): Xaa at position 13 is alpha-methyl-Leu
  MISC_FEATURE (16)..(16): Xaa at position 16 is Orn
  MOD_RES (17)..(17): Lys at position 17 is chemically modified by conjugation of the epsilon-amino group of the Lys side chain with (2-[2-(2-amino-ethoxy)-ethoxy]-acetyl)2-(gamma-Glu)-(10-(4-carbox yphenoxy)decanoyl)
  MISC_FEATURE (20)..(20): Xaa at position 20 is Aib
  MOD_RES (21)..(21): Lys at position 21 is chemically modified by conjugation of the epsilon-amino group of the Lys side chain with (2-[2-(2-amino-ethoxy)-ethoxy]-acetyl)2-(gamma-Glu)-(10-(4-carbox yphenoxy)decanoyl)
  MISC_FEATURE (24)..(24): Xaa at position 24 is D-Glu
  MISC_FEATURE (25)..(25): Xaa at position 25 is alpha-methyl-Tyr
  MOD_RES (39)..(39): Ser at position 39 is amidated

SEQ ID NO: 288 - protein, 39 aa, Artificial Sequence; identical to SEQ ID NO: 27
  Synthetic Construct
  MISC_FEATURE (2)..(2): Xaa at position 2 is Aib
  MISC_FEATURE (6)..(6): Xaa at position 6 is alpha-methyl-Phe(2F)
  MISC_FEATURE (10)..(10): Xaa at position 10 is OMeY
  MISC_FEATURE (13)..(13): Xaa at position 13 is alpha-methyl-Leu
  MISC_FEATURE (16)..(16): Xaa at position 16 is Orn
  MOD_RES (17)..(17): Lys at position 17 is chemically modified by conjugation of the epsilon-amino group of the Lys side chain with (2-[2-(2-amino-ethoxy)-ethoxy]-acetyl)2-(gamma-Glu)-(10-(4-carbox yphenoxy)decanoyl)
  MISC_FEATURE (20)..(20): Xaa at position 20 is Aib
  MISC_FEATURE (24)..(24): Xaa at position 24 is D-Glu
  MISC_FEATURE (25)..(25): Xaa at position 25 is alpha-methyl-Tyr
  MOD_RES (28)..(28): Lys at position 28 is chemically modified by conjugation of the epsilon-amino group of the Lys side chain with (2-[2-(2-amino-ethoxy)-ethoxy]-acetyl)2-(gamma-Glu)-(10-(4-carbox yphenoxy)decanoyl)
  MOD_RES (39)..(39): Ser at position 39 is amidated

SEQ ID NO: 289 - protein, 39 aa, Artificial Sequence; identical to SEQ ID NO: 80
  Synthetic Construct
  MISC_FEATURE (2)..(2): Xaa at position 2 is Aib
  MISC_FEATURE (6)..(6): Xaa at position 6 is alpha-methyl-Phe(2F)
  MISC_FEATURE (10)..(10): Xaa at position 10 is OMeY
  MISC_FEATURE (13)..(13): Xaa at position 13 is alpha-methyl-Leu
  MISC_FEATURE (16)..(16): Xaa at position 16 is Orn
  MISC_FEATURE (20)..(20): Xaa at position 20 is Aib
  MOD_RES (24)..(24): Lys at position 24 is chemically modified by conjugation of the epsilon-amino group of the Lys side chain with (2-[2-(2-amino-ethoxy)-ethoxy]-acetyl)2-(gamma-Glu)-(10-(4-carbox yphenoxy)decanoyl)
  MISC_FEATURE (25)..(25): Xaa at position 25 is alpha-methyl-Tyr
  MOD_RES (28)..(28): Lys at position 28 is chemically modified by conjugation of the epsilon-amino group of the Lys side chain with (2-[2-(2-amino-ethoxy)-ethoxy]-acetyl)2-(gamma-Glu)-(10-(4-carbox yphenoxy)decanoyl)
  MOD_RES (39)..(39): Ser at position 39 is amidated

SEQ ID NO: 290 - protein, 39 aa, Artificial Sequence; identical to SEQ ID NO: 83
  Synthetic Construct
  MISC_FEATURE (2)..(2): Xaa at position 2 is Aib
  MISC_FEATURE (6)..(6): Xaa at position 6 is alpha-methyl-Phe(2F)
  MISC_FEATURE (10)..(10): Xaa at position 10 is OMeY
  MISC_FEATURE (13)..(13): Xaa at position 13 is alpha-methyl-Leu
  MISC_FEATURE (16)..(16): Xaa at position 16 is Orn
  MISC_FEATURE (20)..(20): Xaa at position 20 is Aib
  MOD_RES (21)..(21): Lys at position 21 is chemically modified by conjugation of the epsilon-amino group of the Lys side chain with (2-[2-(2-amino-ethoxy)-ethoxy]-acetyl)2-(gamma-Glu)-(10-(4-carbox yphenoxy)decanoyl)
  MISC_FEATURE (24)..(24): Xaa at position 24 is D-Glu
  MISC_FEATURE (25)..(25): Xaa at position 25 is alpha-methyl-Tyr
  MOD_RES (28)..(28): Lys at position 28 is chemically modified by conjugation of the epsilon-amino group of the Lys side chain with (2-[2-(2-amino-ethoxy)-ethoxy]-acetyl)2-(gamma-Glu)-(10-(4-carbox yphenoxy)decanoyl)
  MOD_RES (39)..(39): Ser at position 39 is amidated

SEQ ID NO: 291 - protein, 39 aa, Artificial Sequence; identical to SEQ ID NO: 25
  Synthetic Construct
  MISC_FEATURE (2)..(2): Xaa at position 2 is Aib
  MISC_FEATURE (6)..(6): Xaa at position 6 is alpha-methyl-Phe(2F)
  MISC_FEATURE (10)..(10): Xaa at position 10 is 2Nal
  misc_feature (13)..(13): Xaa can be any naturally occurring amino acid
  MISC_FEATURE (16)..(16): Xaa at position 16 is Orn
  MOD_RES (17)..(17): Lys at position 17 is chemically modified by conjugation of the epsilon-amino group of the Lys side chain with (2-[2-(2-amino-ethoxy)-ethoxy]-acetyl)2-(gamma-Glu)-(10-(4-carbox yphenoxy)decanoyl)
  MISC_FEATURE (20)..(20): Xaa at position 20 is Aib
  MOD_RES (21)..(21): Lys at position 21 is chemically modified by conjugation of the epsilon-amino group of the Lys side chain with (2-[2-(2-amino-ethoxy)-ethoxy]-acetyl)2-(gamma-Glu)-(10-(4-carbox yphenoxy)decanoyl)
  MISC_FEATURE (24)..(24): Xaa at position 24 is D-Glu
  MISC_FEATURE (25)..(25): Xaa at position 25 is alpha-methyl-Tyr
  MOD_RES (39)..(39): Ser at position 39 is amidated

SEQ ID NO: 292 - protein, 39 aa, Artificial Sequence; identical to SEQ ID NO: 27
  Synthetic Construct
  MISC_FEATURE (2)..(2): Xaa at position 2 is Aib
  MISC_FEATURE (6)..(6): Xaa at position 6 is alpha-methyl-Phe(2F)
  MISC_FEATURE (10)..(10): Xaa at position 10 is 2Nal
  MISC_FEATURE (13)..(13): Xaa at position 13 is alpha-methyl-Leu
  MISC_FEATURE (16)..(16): Xaa at position 16 is Orn
  MOD_RES (17)..(17): Lys at position 17 is chemically modified by conjugation of the epsilon-amino group of the Lys side chain with (2-[2-(2-amino-ethoxy)-ethoxy]-acetyl)2-(gamma-Glu)-(10-(4-carbox yphenoxy)decanoyl)
  MISC_FEATURE (20)..(20): Xaa at position 20 is Aib
  MISC_FEATURE (24)..(24): Xaa at position 24 is D-Glu
  MISC_FEATURE (25)..(25): Xaa at position 25 is alpha-methyl-Tyr
  MOD_RES (28)..(28): Lys at position 28 is chemically modified by conjugation of the epsilon-amino group of the Lys side chain with (2-[2-(2-amino-ethoxy)-ethoxy]-acetyl)2-(gamma-Glu)-(10-(4-carbox yphenoxy)decanoyl)
  MOD_RES (39)..(39): Ser at position 39 is amidated

SEQ ID NO: 293 - protein, 39 aa, Artificial Sequence; identical to SEQ ID NO: 80
  Synthetic Construct
  MISC_FEATURE (2)..(2): Xaa at position 2 is Aib
  MISC_FEATURE (6)..(6): Xaa at position 6 is alpha-methyl-Phe(2F)
  MISC_FEATURE (10)..(10): Xaa at position 10 is 2Nal
  MISC_FEATURE (13)..(13): Xaa at position 13 is alpha-methyl-Leu
  MISC_FEATURE (16)..(16): Xaa at position 16 is Orn
  MISC_FEATURE (20)..(20): Xaa at position 20 is Aib
  MOD_RES (24)..(24): Lys at position 24 is chemically modified by conjugation of the epsilon-amino group of the Lys side chain with (2-[2-(2-amino-ethoxy)-ethoxy]-acetyl)2-(gamma-Glu)-(10-(4-carbox yphenoxy)decanoyl)
  MISC_FEATURE (25)..(25): Xaa at position 25 is alpha-methyl-Tyr
  MOD_RES (28)..(28): Lys at position 28 is chemically modified by conjugation of the epsilon-amino group of the Lys side chain with (2-[2-(2-amino-ethoxy)-ethoxy]-acetyl)2-(gamma-Glu)-(10-(4-carbox yphenoxy)decanoyl)
  MOD_RES (39)..(39): Ser at position 39 is amidated

SEQ ID NO: 294 - protein, 39 aa, Artificial Sequence; identical to SEQ ID NO: 83
  Synthetic Construct
  MISC_FEATURE (2)..(2): Xaa at position 2 is Aib
  MISC_FEATURE (6)..(6): Xaa at position 6 is alpha-methyl-Phe(2F)
  MISC_FEATURE (10)..(10): Xaa at position 10 is 2Nal
  MISC_FEATURE (13)..(13): Xaa at position 13 is alpha-methyl-Leu
  MISC_FEATURE (16)..(16): Xaa at position 16 is Orn
  MISC_FEATURE (20)..(20): Xaa at position 20 is Aib
  MOD_RES (21)..(21): Lys at position 21 is chemically modified by conjugation of the epsilon-amino group of the Lys side chain with (2-[2-(2-amino-ethoxy)-ethoxy]-acetyl)2-(gamma-Glu)-(10-(4-carbox yphenoxy)decanoyl)
  MISC_FEATURE (24)..(24): Xaa at position 24 is D-Glu
  MISC_FEATURE (25)..(25): Xaa at position 25 is alpha-methyl-Tyr
  MOD_RES (28)..(28): Lys at position 28 is chemically modified by conjugation of the epsilon-amino group of the Lys side chain with (2-[2-(2-amino-ethoxy)-ethoxy]-acetyl)2-(gamma-Glu)-(10-(4-carbox yphenoxy)decanoyl)
  MOD_RES (39)..(39): Ser at position 39 is amidated

SEQ ID NO: 295 - protein, 40 aa, Artificial Sequence; identical to SEQ ID NO: 29
  Synthetic Construct
  MISC_FEATURE (2)..(2): Xaa at position 2 is Aib
  MISC_FEATURE (6)..(6): Xaa at position 6 is alpha-methyl-Phe(2F)
  MISC_FEATURE (10)..(10): Xaa at position 10 is 4Pal
  MISC_FEATURE (13)..(13): Xaa at position 13 is alpha-methyl-Leu
  MISC_FEATURE (16)..(16): Xaa at position 16 is Orn
  MOD_RES (17)..(17): Lys at position 17 is chemically modified by conjugation of the epsilon-amino group of the Lys side chain with (2-[2-(2-amino-ethoxy)-ethoxy]-acetyl)2-(gamma-Glu)-(11-(4-carbox yphenoxy)undecanoyl)
  MISC_FEATURE (20)..(20): Xaa at position 20 is Aib
  MISC_FEATURE (24)..(24): Xaa at position 24 is D-Glu
  MISC_FEATURE (25)..(25): Xaa at position 25 is alpha-methyl-Tyr
  MOD_RES (40)..(40): Lys at position 40 is chemically modified by conjugation of the epsilon-amino group of the Lys side chain with (2-[2-(2-amino-ethoxy)-ethoxy]-acetyl)2-(gamma-Glu)-(11-(4-carbox yphenoxy)undecanoyl)
  MOD_RES (40)..(40): Lys at position 40 is amidated

SEQ ID NO: 296 - protein, 39 aa, Artificial Sequence; identical to SEQ ID NO: 80
  Synthetic Construct
  MISC_FEATURE (2)..(2): Xaa at position 2 is Aib
  MISC_FEATURE (6)..(6): Xaa at position 6 is alpha-methyl-Phe(2F)
  MISC_FEATURE (10)..(10): Xaa at position 10 is 4Pal
  MISC_FEATURE (13)..(13): Xaa at position 13 is alpha-methyl-Leu
  MISC_FEATURE (16)..(16): Xaa at position 16 is Orn
  MISC_FEATURE (20)..(20): Xaa at position 20 is Aib
  MOD_RES (24)..(24): Lys at position 24 is chemically modified by conjugation of the epsilon-amino group of the Lys side chain with (2-[2-(2-amino-ethoxy)-ethoxy]-acetyl)2-(gamma-Glu)-(11-(4-carbox yphenoxy)undecanoyl
  MISC_FEATURE (25)..(25): Xaa at position 25 is alpha-methyl-Tyr
  MOD_RES (28)..(28): Lys at position 28 is chemically modified by conjugation of the epsilon-amino group of the Lys side chain with (2-[2-(2-amino-ethoxy)-ethoxy]-acetyl)2-(gamma-Glu)-(11-(4-carbox yphenoxy)undecanoyl
  MOD_RES (39)..(39): Ser at position 39 is amidated

SEQ ID NO: 297 - protein, 39 aa, Artificial Sequence; identical to SEQ ID NO: 83
  Synthetic Construct
  MISC_FEATURE (2)..(2): Xaa at position 2 is Aib
  MISC_FEATURE (6)..(6): Xaa at position 6 is alpha-methyl-Phe(2F)
  MISC_FEATURE (10)..(10): Xaa at position 10 is 4Pal
  MISC_FEATURE (13)..(13): Xaa at position 13 is alpha-methyl-Leu
  MISC_FEATURE (16)..(16): Xaa at position 16 is Orn
  MISC_FEATURE (20)..(20): Xaa at position 20 is Aib
  MOD_RES (21)..(21): Lys at position 21 is chemically modified by conjugation of the epsilon-amino group of the Lys side chain with (2-[2-(2-amino-ethoxy)-ethoxy]-acetyl)2-(gamma-Glu)-(11-(4-carbox yphenoxy)undecanoyl
  MISC_FEATURE (24)..(24): Xaa at position 24 is D-Glu
  MISC_FEATURE (25)..(25): Xaa at position 25 is alpha-methyl-Tyr
  MOD_RES (28)..(28): Lys at position 28 is chemically modified by conjugation of the epsilon-amino group of the Lys side chain with (2-[2-(2-amino-ethoxy)-ethoxy]-acetyl)2-(gamma-Glu)-(11-(4-carbox yphenoxy)undecanoyl
  MOD_RES (39)..(39): Ser at position 39 is amidated

SEQ ID NO: 298 - protein, 40 aa, Artificial Sequence; identical to SEQ ID NO: 85
  Synthetic Construct
  MISC_FEATURE (2)..(2): Xaa at position 2 is Aib
  MISC_FEATURE (6)..(6): Xaa at position 6 is alpha-methyl-Phe(2F)
  MISC_FEATURE (10)..(10): Xaa at position 10 is 4Pal
  MISC_FEATURE (13)..(13): Xaa at position 13 is alpha-methyl-Leu
  MISC_FEATURE (16)..(16): Xaa at position 16 is Orn
  MISC_FEATURE (20)..(20): Xaa at position 20 is Aib
  MOD_RES (21)..(21): Lys at position 21 is chemically modified by conjugation of the epsilon-amino group of the Lys side chain with (2-[2-(2-amino-ethoxy)-ethoxy]-acetyl)2-(gamma-Glu)-(11-(4-carbox yphenoxy)undecanoyl
  MISC_FEATURE (24)..(24): Xaa at position 24 is D-Glu
  MISC_FEATURE (25)..(25): Xaa at position 25 is alpha-methyl-Tyr
  MOD_RES (40)..(40): Lys at position 40 is chemically modified by conjugation of the epsilon-amino group of the Lys side chain with (2-[2-(2-amino-ethoxy)-ethoxy]-acetyl)2-(gamma-Glu)-(11-(4-carbox yphenoxy)undecanoyl
  MOD_RES (40)..(40): Lys at position 40 is amidated

SEQ ID NO: 299 - protein, 39 aa, Artificial Sequence; identical to SEQ ID NO: 25
  Synthetic Construct
  MISC_FEATURE (2)..(2): Xaa at position 2 is Aib
  MISC_FEATURE (6)..(6): Xaa at position 6 is alpha-methyl-Phe(2F)
  MISC_FEATURE (10)..(10): Xaa at position 10 is OMeY
  MISC_FEATURE (13)..(13): Xaa at position 13 is alpha-methyl-Leu
  MISC_FEATURE (16)..(16): Xaa at position 16 is Orn
  MOD_RES (17)..(17): Lys at position 17 is chemically modified by conjugation of the epsilon-amino group of the Lys side chain with (2-[2-(2-amino-ethoxy)-ethoxy]-acetyl)2-(gamma-Glu)-CO-(CH2)10-CH 3
  MISC_FEATURE (20)..(20): Xaa at position 20 is Aib
  MOD_RES (21)..(21): Lys at position 21 is chemically modified by conjugation of the epsilon-amino group of the Lys side chain with (2-[2-(2-amino-ethoxy)-ethoxy]-acetyl)2-(gamma-Glu)-CO-(CH2)10-CH 3
  MISC_FEATURE (24)..(24): Xaa at position 24 is D-Glu
  MISC_FEATURE (25)..(25): Xaa at position 25 is alpha-methyl-Tyr
  MOD_RES (39)..(39): Ser at position 39 is amidated

SEQ ID NO: 300 - protein, 39 aa, Artificial Sequence; identical to SEQ ID NO: 27
  Synthetic Construct
  MISC_FEATURE (2)..(2): Xaa at position 2 is Aib
  MISC_FEATURE (6)..(6): Xaa at position 6 is alpha-methyl-Phe(2F)
  MISC_FEATURE (10)..(10): Xaa at position 10 is OMeY
  MISC_FEATURE (13)..(13): Xaa at position 13 is alpha-methyl-Leu
  MISC_FEATURE (16)..(16): Xaa at position 16 is Orn
  MOD_RES (17)..(17): Lys at position 31 is chemically modified by conjugation of the epsilon-amino group of the Lys side chain with (2-[2-(2-amino-ethoxy)-ethoxy]-acetyl)2-(gamma-Glu)-CO-(CH2)10-CH 3
  MISC_FEATURE (20)..(20): Xaa at position 20 is Aib
  MISC_FEATURE (24)..(24): Xaa at position 24 is D-Glu
  MISC_FEATURE (25)..(25): Xaa at position 25 is alpha-methyl-Tyr
  MOD_RES (28)..(28): Lys at position 28 is chemically modified by conjugation of the epsilon-amino group of the Lys side chain with (2-[2-(2-amino-ethoxy)-ethoxy]-acetyl)2-(gamma-Glu)-CO-(CH2)10-CH 3
  MOD_RES (39)..(39): Ser at position 39 is amidated

SEQ ID NO: 301 - protein, 40 aa, Artificial Sequence; identical to SEQ ID NO: 29
  Synthetic Construct
  MISC_FEATURE (2)..(2): Xaa at position 2 is Aib
  MISC_FEATURE (6)..(6): Xaa at position 6 is alpha-methyl-Phe(2F)
  MISC_FEATURE (10)..(10): Xaa at position 10 is OMeY
  MISC_FEATURE (13)..(13): Xaa at position 13 is alpha-methyl-Leu
  MISC_FEATURE (16)..(16): Xaa at position 16 is Orn
  MOD_RES (17)..(17): Lys at position 17 is chemically modified by conjugation of the epsilon-amino group of the Lys side chain with (2-[2-(2-amino-ethoxy)-ethoxy]-acetyl)2-(gamma-Glu)-CO-(CH2)10-CH 3
  MISC_FEATURE (20)..(20): Xaa at position 20 is Aib
  MISC_FEATURE (24)..(24): Xaa at position 24 is D-Glu
  MISC_FEATURE (25)..(25): Xaa at position 25 is alpha-methyl-Tyr
  MOD_RES (40)..(40): Lys at position 40 is chemically modified by conjugation of the epsilon-amino group of the Lys side chain with (2-[2-(2-amino-ethoxy)-ethoxy]-acetyl)2-(gamma-Glu)-CO-(CH2)10-CH 3
  MOD_RES (40)..(40): Lys at position 40 is amidated

SEQ ID NO: 302 - protein, 39 aa, Artificial Sequence
  Synthetic Construct
  MISC_FEATURE (2)..(2): Xaa at position 2 is Aib
  MISC_FEATURE (6)..(6): Xaa at position 6 is alpha-methyl-Phe(2F)
  MOD_RES (10)..(10): Lys at position 10 is chemically modified by conjugation of the epsilon-amino group of the Lys side chain with (2-[2-(2-amino-ethoxy)-ethoxy]-acetyl)2-(gamma-Glu)-CO-(CH2)10-CH 3
  MISC_FEATURE (11)..(11): Xaa at position 11 is Aib
  MISC_FEATURE (13)..(13): Xaa at position 13 is alpha-methyl-Leu
  MISC_FEATURE (16)..(16): Xaa at position 16 is Orn
  MOD_RES (17)..(17): Lys at position 17 is chemically modified by conjugation of the epsilon-amino group of the Lys side chain with (2-[2-(2-amino-ethoxy)-ethoxy]-acetyl)2-(gamma-Glu)-CO-(CH2)10-CH 3
  MISC_FEATURE (20)..(20): Xaa at position 20 is Aib
  MISC_FEATURE (24)..(24): Xaa at position 24 is D-Glu
  MISC_FEATURE (25)..(25): Xaa at position 25 is alpha-methyl-Tyr
  MOD_RES (39)..(39): Ser at position 39 is amidated
YXEGTXTSDKXIXLDXKAQXEFIXXLIEGGPSSGAPPPS

SEQ ID NO: 303 - protein, 39 aa, Artificial Sequence
  Synthetic Construct
  MISC_FEATURE (2)..(2): Xaa at position 2 is Aib
  MISC_FEATURE (6)..(6): Xaa at position 6 is alpha-methyl-Phe(2F)
  MOD_RES (10)..(10): Lys at position 10 is chemically modified by conjugation of the epsilon-amino group of the Lys side chain with (2-[2-(2-amino-ethoxy)-ethoxy]-acetyl)2-(gamma-Glu)-CO-(CH2)10-CH 3
  MISC_FEATURE (13)..(13): Xaa at position 13 is alpha-methyl-Leu
  MISC_FEATURE (16)..(16): Xaa at position 16 is Orn
  MOD_RES (17)..(17): Lys at position 17 is chemically modified by conjugation of the epsilon-amino group of the Lys side chain with (2-[2-(2-amino-ethoxy)-ethoxy]-acetyl)2-(gamma-Glu)-CO-(CH2)10-CH 3
  MISC_FEATURE (20)..(20): Xaa at position 20 is Aib
  MISC_FEATURE (22)..(22): Xaa at position 22 is alpha-methyl-Phe
  MISC_FEATURE (24)..(24): Xaa at position 24 is D-Glu
  MISC_FEATURE (25)..(25): Xaa at position 25 is alpha-methyl-Tyr
  MOD_RES (39)..(39): Ser at position 39 is amidated
YXEGTXTSDKSIXLDXKAQXEXIXXLIEGGPSSGAPPPS

SEQ ID NO: 304 - protein, 30 aa, Artificial Sequence
  Synthetic Construct
  MISC_FEATURE (2)..(2): Xaa at position 2 is Aib
  MISC_FEATURE (6)..(6): Xaa at position 6 is alpha-methyl-Phe(2F)
  MOD_RES (10)..(10): Lys at position 10 is chemically modified by conjugation of the epsilon-amino group of the Lys side chain with (2-[2-(2-amino-ethoxy)-ethoxy]-acetyl)2-(gamma-Glu)-CO-(CH2)10-CH 3
  MISC_FEATURE (13)..(13): Xaa at position 13 is alpha-methyl-Leu
  MISC_FEATURE (16)..(16): Xaa at position 16 is Orn
  MOD_RES (17)..(17): Lys at position 17 is chemically modified by conjugation of the epsilon-amino group of the Lys side chain with (2-[2-(2-amino-ethoxy)-ethoxy]-acetyl)2-(gamma-Glu)-CO-(CH2)10-CH 3
  MISC_FEATURE (20)..(20): Xaa at position 20 is Aib
  MISC_FEATURE (24)..(24): Xaa at position 24 is D-Glu
  MISC_FEATURE (25)..(25): Xaa at position 25 is alpha-methyl-Tyr
  MOD_RES (30)..(30): Gly at position 30 is amidated
YXEGTXTSDKSIXLDXKAQXEFIXXLIEGG

SEQ ID NO: 305 - protein, 30 aa, Artificial Sequence
  Synthetic Construct
  MISC_FEATURE (2)..(2): Xaa at position 2 is Aib
  MISC_FEATURE (6)..(6): Xaa at position 6 is alpha-methyl-Phe(2F)
  MISC_FEATURE (10)..(10): Xaa at position 10 is 4Pal
  MISC_FEATURE (13)..(13): Xaa at position 13 is alpha-methyl-Leu
  MISC_FEATURE (16)..(16): Xaa at position 16 is Orn
  MOD_RES (17)..(17): Lys at position 17 is chemically modified by conjugation of the epsilon-amino group of the Lys side chain with (2-[2-(2-amino-ethoxy)-ethoxy]-acetyl)2-(gamma-Glu)-CO-(CH2)10-CH 3
  MISC_FEATURE (20)..(20): Xaa at position 20 is Aib
  MOD_RES (21)..(21): Lys at position 21 is chemically modified by conjugation of the epsilon-amino group of the Lys side chain with (2-[2-(2-amino-ethoxy)-ethoxy]-acetyl)2-(gamma-Glu)-CO-(CH2)10-CH 3
  MISC_FEATURE (24)..(24): Xaa at position 24 is D-Glu
  MISC_FEATURE (25)..(25): Xaa at position 25 is alpha-methyl-Tyr
  MOD_RES (30)..(30): Gly at position 30 is amidated
YXEGTXTSDXSIXLDXKAQXKFIXXLIEGG

SEQ ID NO: 306 - protein, 30 aa, Artificial Sequence
  Synthetic Construct
  MISC_FEATURE (2)..(2): Xaa at position 2 is Aib
  MISC_FEATURE (6)..(6): Xaa at position 6 is alpha-methyl-Phe(2F)
  MISC_FEATURE (10)..(10): Xaa at position 10 is 4Pal
  MISC_FEATURE (13)..(13): Xaa at position 13 is alpha-methyl-Leu
  MISC_FEATURE (16)..(16): Xaa at position 16 is Orn
  MOD_RES (17)..(17): Lys at position 17 is chemically modified by conjugation of the epsilon-amino group of the Lys side chain with (2-[2-(2-amino-ethoxy)-ethoxy]-acetyl)2-(gamma-Glu)-CO-(CH2)10-CH 3
  MISC_FEATURE (20)..(20): Xaa at position 20 is Aib
  MISC_FEATURE (24)..(24): Xaa at position 24 is D-Glu
  MISC_FEATURE (25)..(25): Xaa at position 25 is alpha-methyl-Tyr
  MOD_RES (28)..(28): Lys at position 28 is chemically modified by conjugation of the epsilon-amino group of the Lys side chain with (2-[2-(2-amino-ethoxy)-ethoxy]-acetyl)2-(gamma-Glu)-CO-(CH2)10-CH 3
  MOD_RES (30)..(30): Gly at position 30 is amidated
YXEGTXTSDXSIXLDXKAQXEFIXXLIKGG

SEQ ID NO: 307 - protein, 30 aa, Artificial Sequence
  Synthetic Construct
  MISC_FEATURE (2)..(2): Xaa at position 2 is Aib
  MISC_FEATURE (6)..(6): Xaa at position 6 is alpha-methyl-Phe(2F)
  MOD_RES (10)..(10): Lys at position 10 is chemically modified by conjugation of the epsilon-amino group of the Lys side chain with (2-[2-(2-amino-ethoxy)-ethoxy]-acetyl)2-(gamma-Glu)-CO-(CH2)10-CH 3
  MISC_FEATURE (13)..(13): Xaa at position 13 is alpha-methyl-Leu
  MISC_FEATURE (16)..(16): Xaa at position 16 is Orn
  MOD_RES (17)..(17): Lys at position 17 is chemically modified by conjugation of the epsilon-amino group of the Lys side chain with (2-[2-(2-amino-ethoxy)-ethoxy]-acetyl)2-(gamma-Glu)-CO-(CH2)10-CH 3
  MISC_FEATURE (20)..(20): Xaa at position 20 is Aib
  MISC_FEATURE (22)..(22): Xaa at position 22 is alpha-methyl-Phe
  MISC_FEATURE (24)..(24): Xaa at position 24 is D-Glu
  MISC_FEATURE (25)..(25): Xaa at position 25 is alpha-methyl-Tyr
  MOD_RES (30)..(30): Gly at position 30 is amidated
YXEGTXTSDKSIXLDXKAQXEXIXXLIEGG

SEQ ID NO: 308 - protein, 39 aa, Artificial Sequence
  Synthetic Construct
  MISC_FEATURE (2)..(2): Xaa at position 2 is Aib
  MISC_FEATURE (6)..(6): Xaa at position 6 is alpha-methyl-Phe(2F)
  MISC_FEATURE (10)..(10): Xaa at position 10 is 4Pal
  MISC_FEATURE (13)..(13): Xaa at position 13 is alpha-methyl-Leu
  MISC_FEATURE (16)..(16): Xaa at position 16 is Orn
  MOD_RES (17)..(17): Lys at position 17 is chemically modified by conjugation of the epsilon-amino group of the Lys side chain with (2-[2-(2-amino-ethoxy)-ethoxy]-acetyl)2-(gamma-Glu)-CO-(CH2)10-CH 3
  MISC_FEATURE (20)..(20): Xaa at position 20 is Aib
  MOD_RES (21)..(21): Lys at position 21 is chemically modified by conjugation of the epsilon-amino group of the Lys side chain with (2-[2-(2-amino-ethoxy)-ethoxy]-acetyl)2-(gamma-Glu)-CO-(CH2)10-CH 3
  MISC_FEATURE (24)..(24): Xaa at position 24 is D-Glu
  MISC_FEATURE (25)..(25): Xaa at position 25 is alpha-methyl-Tyr
  MISC_FEATURE (28)..(28): Xaa at position 28 is Orn
  MOD_RES (39)..(39): Ser at position 39 is amidated
YXEGTXTSDXSIXLDXKAQXKFIXXLIXGGPSSGAPPPS

SEQ ID NO: 309 - protein, 39 aa, Artificial Sequence
  Synthetic Construct
  MISC_FEATURE (2)..(2): Xaa at position 2 is Aib
  MISC_FEATURE (6)..(6): Xaa at position 6 is alpha-methyl-Phe(2F)
  MISC_FEATURE (10)..(10): Xaa at position 10 is 4Pal
  MISC_FEATURE (13)..(13): Xaa at position 13 is alpha-methyl-Leu
  MISC_FEATURE (16)..(16): Xaa at position 16 is Orn
  MOD_RES (17)..(17): Lys at position 17 is chemically modified by conjugation of the epsilon-amino group of the Lys side chain with (2-[2-(2-amino-ethoxy)-ethoxy]-acetyl)2-(gamma-Glu)-CO-(CH2)10-CH 3
  MISC_FEATURE (20)..(20): Xaa at position 20 is Aib
  MISC_FEATURE (21)..(21): Xaa at position 21 is Orn
  MISC_FEATURE (24)..(24): Xaa at position 24 is D-Glu
  MISC_FEATURE (25)..(25): Xaa at position 25 is alpha-methyl-Tyr
  MOD_RES (28)..(28): Lys at position 28 is chemically modified by conjugation of the epsilon-amino group of the Lys side chain with (2-[2-(2-amino-ethoxy)-ethoxy]-acetyl)2-(gamma-Glu)-CO-(CH2)10-CH 3
  MOD_RES (39)..(39): Ser at position 39 is amidated
YXEGTXTSDXSIXLDXKAQXXFIXXLIKGGPSSGAPPPS

SEQ ID NO: 310 - protein, 39 aa, Artificial Sequence; identical to SEQ ID NO: 240
  Synthetic Construct
  MISC_FEATURE (2)..(2): Xaa at position 2 is Aib
  MISC_FEATURE (6)..(6): Xaa at position 6 is alpha-methyl-Phe(2F)
  MISC_FEATURE (11)..(11): Xaa at position 11 is Aib
  MISC_FEATURE (13)..(13): Xaa at position 13 is alpha-methyl-Leu
  MISC_FEATURE (16)..(16): Xaa at position 16 is Orn
  MOD_RES (17)..(17): Lys at position 17 is chemically modified by conjugation of the epsilon-amino group of the Lys side chain with (2-[2-(2-amino-ethoxy)-ethoxy]-acetyl)2-(gamma-Glu)-CO-(CH2)10-CH 3
  MISC_FEATURE (20)..(20): Xaa at position 20 is Aib
  MOD_RES (21)..(21): Lys at position 21 is chemically modified by conjugation of the epsilon-amino group of the Lys side chain with (2-[2-(2-amino-ethoxy)-ethoxy]-acetyl)2-(gamma-Glu)-CO-(CH2)10-CH 3
  MISC_FEATURE (24)..(24): Xaa at position 24 is D-Glu
  MISC_FEATURE (25)..(25): Xaa at position 25 is alpha-methyl-Tyr
  MOD_RES (39)..(39): Ser at position 39 is amidated

SEQ ID NO: 311 - protein, 39 aa, Artificial Sequence; identical to SEQ ID NO: 241
  Synthetic Construct
  MISC_FEATURE (2)..(2): Xaa at position 2 is Aib
  MISC_FEATURE (6)..(6): Xaa at position 6 is alpha-methyl-Phe(2F)
  MISC_FEATURE (11)..(11): Xaa at position 11 is Aib
  MISC_FEATURE (13)..(13): Xaa at position 13 is alpha-methyl-Leu
  MISC_FEATURE (16)..(16): Xaa at position 16 is Orn
  MOD_RES (17)..(17): Lys at position 17 is chemically modified by conjugation of the epsilon-amino group of the Lys side chain with (2-[2-(2-amino-ethoxy)-ethoxy]-acetyl)2-(gamma-Glu)-CO-(CH2)10-CH 3
  MISC_FEATURE (20)..(20): Xaa at position 20 is Aib
  MISC_FEATURE (24)..(24): Xaa at position 24 is D-Glu
  MISC_FEATURE (25)..(25): Xaa at position 25 is alpha-methyl-Tyr
  MOD_RES (28)..(28): Lys at position 28 is chemically modified by conjugation of the epsilon-amino group of the Lys side chain with (2-[2-(2-amino-ethoxy)-ethoxy]-acetyl)2-(gamma-Glu)-CO-(CH2)10-CH 3
  MOD_RES (39)..(39): Ser at position 39 is amidated

SEQ ID NO: 312 - protein, 40 aa, Artificial Sequence; identical to SEQ ID NO: 242
  Synthetic Construct
  MISC_FEATURE (2)..(2): Xaa at position 2 is Aib
  MISC_FEATURE (6)..(6): Xaa at position 6 is alpha-methyl-Phe(2F)
  MISC_FEATURE (11)..(11): Xaa at position 11 is Aib
  MISC_FEATURE (13)..(13): Xaa at position 13 is alpha-methyl-Leu
  MISC_FEATURE (16)..(16): Xaa at position 16 is Orn
  MOD_RES (17)..(17): Lys at position 17 is chemically modified by conjugation of the epsilon-amino group of the Lys side chain with (2-[2-(2-amino-ethoxy)-ethoxy]-acetyl)2-(gamma-Glu)-CO-(CH2)10-CH 3
  MISC_FEATURE (20)..(20): Xaa at position 20 is Aib
  MISC_FEATURE (24)..(24): Xaa at position 24 is D-Glu
  MISC_FEATURE (25)..(25): Xaa at position 25 is alpha-methyl-Tyr
  MOD_RES (40)..(40): Lys at position 40 is chemically modified by conjugation of the epsilon-amino group of the Lys side chain with (2-[2-(2-amino-ethoxy)-ethoxy]-acetyl)2-(gamma-Glu)-CO-(CH2)10-CH 3
  MOD_RES (40)..(40): Lys at position 40 is amidated

SEQ ID NO: 313 - protein, 39 aa, Artificial Sequence; identical to SEQ ID NO: 243
  Synthetic Construct
  MISC_FEATURE (2)..(2): Xaa at position 2 is Aib
  MISC_FEATURE (6)..(6): Xaa at position 6 is alpha-methyl-Phe(2F)
  MISC_FEATURE (11)..(11): Xaa at position 11 is alpha-methyl-Ser
  MISC_FEATURE (13)..(13): Xaa at position 13 is alpha-methyl-Leu
  MISC_FEATURE (16)..(16): Xaa at position 16 is Orn
  MISC_FEATURE (20)..(20): Xaa at position 20 is Aib
  MOD_RES (24)..(24): Lys at position 24 is chemically modified by conjugation of the epsilon-amino group of the Lys side chain with (2-[2-(2-amino-ethoxy)-ethoxy]-acetyl)2-(gamma-Glu)-CO-(CH2)12-CO 2H
  MISC_FEATURE (25)..(25): Xaa at position 25 is alpha-methyl-Tyr
  MOD_RES (28)..(28): Lys at position 28 is chemically modified by conjugation of the epsilon-amino group of the Lys side chain with (2-[2-(2-amino-ethoxy)-ethoxy]-acetyl)2-(gamma-Glu)-CO-(CH2)12-CO 2H
  MOD_RES (39)..(39): Ser at position 39 is amidated

SEQ ID NO: 314 - protein, 39 aa, Artificial Sequence
  Synthetic Construct
  MISC_FEATURE (2)..(2): Xaa at position 2 is Aib
  MISC_FEATURE (6)..(6): Xaa at position 6 is alpha-methyl-Phe(2F)
  MISC_FEATURE (11)..(11): Xaa at position 11 is Aib
  MISC_FEATURE (13)..(13): Xaa at position 13 is alpha-methyl-Leu
  MISC_FEATURE (16)..(16): Xaa at position 16 is Orn
  MISC_FEATURE (20)..(20): Xaa at position 20 is Aib
  MOD_RES (24)..(24): Lys at position 24 is chemically modified by conjugation of the epsilon-amino group of the Lys side chain with (2-[2-(2-amino-ethoxy)-ethoxy]-acetyl)2-(gamma-Glu)-CO-(CH2)12-CO 2H
  MISC_FEATURE (25)..(25): Xaa at position 25 is alpha-methyl-Tyr
  MOD_RES (28)..(28): Lys at position 28 is chemically modified by conjugation of the epsilon-amino group of the Lys side chain with (2-[2-(2-amino-ethoxy)-ethoxy]-acetyl)2-(gamma-Glu)-CO-(CH2)12-CO 2H
  MOD_RES (39)..(39): Ser at position 39 is amidated
YXEGTXTSDVXIXLDXIAQXEFIKXLIKGGPSSGAPPPS

SEQ ID NO: 315 - protein, 39 aa, Artificial Sequence; identical to SEQ ID NO: 314
  Synthetic Construct
  MISC_FEATURE (2)..(2): Xaa at position 2 is Aib
  MISC_FEATURE (6)..(6): Xaa at position 6 is alpha-methyl-Phe(2F)
  MISC_FEATURE (11)..(11): Xaa at position 11 is alpha-methyl-Ser
  MISC_FEATURE (13)..(13): Xaa at position 13 is alpha-methyl-Leu
  MISC_FEATURE (16)..(16): Xaa at position 16 is Orn
  MISC_FEATURE (20)..(20): Xaa at position 20 is Aib
  MOD_RES (24)..(24): Lys at position 24 is chemically modified by conjugation of the epsilon-amino group of the Lys side chain with (2-[2-(2-amino-ethoxy)-ethoxy]-acetyl)2-(gamma-Glu)-CO-(CH2)12-CO 2H
  MISC_FEATURE (25)..(25): Xaa at position 25 is alpha-methyl-Tyr
  MOD_RES (28)..(28): Lys at position 28 is chemically modified by conjugation of the epsilon-amino group of the Lys side chain with (2-[2-(2-amino-ethoxy)-ethoxy]-acetyl)2-(gamma-Glu)-CO-(CH2)12-CO 2H
  MOD_RES (39)..(39): Ser at position 39 is amidated

SEQ ID NO: 316 - protein, 39 aa, Artificial Sequence; identical to SEQ ID NO: 226
  Synthetic Construct
  MISC_FEATURE (2)..(2): Xaa at position 2 is Aib
  MISC_FEATURE (6)..(6): Xaa at position 6 is alpha-methyl-Phe(2F)
  MISC_FEATURE (10)..(10): Xaa at position 10 is 4Pal
  MISC_FEATURE (11)..(11): Xaa at position 11 is alpha-methyl-Ser
  MISC_FEATURE (13)..(13): Xaa at position 13 is alpha-methyl-Leu
  MISC_FEATURE (16)..(16): Xaa at position 16 is Orn
  MISC_FEATURE (20)..(20): Xaa at position 20 is Aib
  MOD_RES (24)..(24): Lys at position 24 is chemically modified by conjugation of the epsilon-amino group of the Lys side chain with (2-[2-(2-amino-ethoxy)-ethoxy]-acetyl)2-(gamma-Glu)-(10-(4-carbox yphenoxy)decanoyl)
  MISC_FEATURE (25)..(25): Xaa at position 25 is alpha-methyl-Tyr
  MOD_RES (28)..(28): Lys at position 28 is chemically modified by conjugation of the epsilon-amino group of the Lys side chain with (2-[2-(2-amino-ethoxy)-ethoxy]-acetyl)2-(gamma-Glu)-(10-(4-carbox yphenoxy)decanoyl)
  MOD_RES (39)..(39): Ser at position 39 is amidated

SEQ ID NO: 317 - protein, 39 aa, Artificial Sequence; identical to SEQ ID NO: 243
  Synthetic Construct
  MISC_FEATURE (2)..(2): Xaa at position 2 is Aib
  MISC_FEATURE (6)..(6): Xaa at position 6 is alpha-methyl-Phe(2F)
  MISC_FEATURE (11)..(11): Xaa at position 11 is alpha-methyl-Ser
  MISC_FEATURE (13)..(13): Xaa at position 13 is alpha-methyl-Leu
  MISC_FEATURE (16)..(16): Xaa at position 16 is Orn
  MISC_FEATURE (20)..(20): Xaa at position 20 is Aib
  MOD_RES (24)..(24): Lys at position 24 is chemically modified by conjugation of the epsilon-amino group of the Lys side chain with (2-[2-(2-amino-ethoxy)-ethoxy]-acetyl)2-(gamma-Glu)-(10-(4-carbox yphenoxy)decanoyl)
  MISC_FEATURE (25)..(25): Xaa at position 25 is alpha-methyl-Tyr
  MOD_RES (28)..(28): Lys at position 28 is chemically modified by conjugation of the epsilon-amino group of the Lys side chain with (2-[2-(2-amino-ethoxy)-ethoxy]-acetyl)2-(gamma-Glu)-(10-(4-carbox yphenoxy)decanoyl)
  MOD_RES (39)..(39): Ser at position 39 is amidated

SEQ ID NO: 318 - protein, 39 aa, Artificial Sequence; identical to SEQ ID NO: 314
  Synthetic Construct
  MISC_FEATURE (2)..(2): Xaa at position 2 is Aib
  MISC_FEATURE (6)..(6): Xaa at position 6 is alpha-methyl-Phe(2F)
  MISC_FEATURE (11)..(11): Xaa at position 11 is Aib
  MISC_FEATURE (13)..(13): Xaa at position 13 is alpha-methyl-Leu
  MISC_FEATURE (16)..(16): Xaa at position 16 is Orn
  MISC_FEATURE (20)..(20): Xaa at position 20 is Aib
  MOD_RES (24)..(24): Lys at position 24 is chemically modified by conjugation of the epsilon-amino group of the Lys side chain with (2-[2-(2-amino-ethoxy)-ethoxy]-acetyl)2-(gamma-Glu)-(10-(4-carbox yphenoxy)decanoyl)
  MISC_FEATURE (25)..(25): Xaa at position 25 is alpha-methyl-Tyr
  MOD_RES (28)..(28): Lys at position 28 is chemically modified by conjugation of the epsilon-amino group of the Lys side chain with (2-[2-(2-amino-ethoxy)-ethoxy]-acetyl)2-(gamma-Glu)-(10-(4-carbox yphenoxy)decanoyl)
  MOD_RES (39)..(39): Ser at position 39 is amidated

SEQ ID NO: 319 - protein, 39 aa, Artificial Sequence; identical to SEQ ID NO: 314
  Synthetic Construct
  MISC_FEATURE (2)..(2): Xaa at position 2 is Aib
  MISC_FEATURE (6)..(6): Xaa at position 6 is alpha-methyl-Phe(2F)
  MISC_FEATURE (11)..(11): Xaa at position 11 is alpha-methyl-Ser
  MISC_FEATURE (13)..(13): Xaa at position 13 is alpha-methyl-Leu
  MISC_FEATURE (16)..(16): Xaa at position 16 is Orn
  MISC_FEATURE (20)..(20): Xaa at position 20 is Aib
  MOD_RES (24)..(24): Lys at position 24 is chemically modified by conjugation of the epsilon-amino group of the Lys side chain with (2-[2-(2-amino-ethoxy)-ethoxy]-acetyl)2-(gamma-Glu)-(10-(4-carbox yphenoxy)decanoyl)
  MISC_FEATURE (25)..(25): Xaa at position 25 is alpha-methyl-Tyr
  MOD_RES (28)..(28): Lys at position 28 is chemically modified by conjugation of the epsilon-amino group of the Lys side chain with (2-[2-(2-amino-ethoxy)-ethoxy]-acetyl)2-(gamma-Glu)-(10-(4-carbox yphenoxy)decanoyl)
  MOD_RES (39)..(39): Ser at position 39 is amidated

SEQ ID NO: 320 - protein, 39 aa, Artificial Sequence; identical to SEQ ID NO: 80
  Synthetic Construct
  MISC_FEATURE (2)..(2): Xaa at position 2 is Aib
  MISC_FEATURE (6)..(6): Xaa at position 6 is alpha-methyl-Phe(2F)
  MISC_FEATURE (10)..(10): Xaa at position 10 is hTyr
  MISC_FEATURE (13)..(13): Xaa at position 13 is alpha-methyl-Leu
  MISC_FEATURE (16)..(16): Xaa at position 16 is Orn
  MISC_FEATURE (20)..(20): Xaa at position 20 is Aib
  MOD_RES (24)..(24): Lys at position 24 is chemically modified by conjugation of the epsilon-amino group of the Lys side chain with (2-[2-(2-amino-ethoxy)-ethoxy]-acetyl)2-(gamma-Glu)-(10-(4-carbox yphenoxy)decanoyl)
  MISC_FEATURE (25)..(25): Xaa at position 25 is alpha-methyl-Tyr
  MOD_RES (28)..(28): Lys at position 28 is chemically modified by conjugation of the epsilon-amino group of the Lys side chain with (2-[2-(2-amino-ethoxy)-ethoxy]-acetyl)2-(gamma-Glu)-(10-(4-carbox yphenoxy)decanoyl)
  MOD_RES (39)..(39): Ser at position 39 is amidated

SEQ ID NO: 321 - protein, 39 aa, Artificial Sequence; identical to SEQ ID NO: 226
  Synthetic Construct
  MISC_FEATURE (2)..(2): Xaa at position 2 is Aib
  MISC_FEATURE (6)..(6): Xaa at position 6 is alpha-methyl-Phe(2F)
  MISC_FEATURE (10)..(10): Xaa at position 10 is 4Pal
  MISC_FEATURE (11)..(11): Xaa at position 11 is Aib
  MISC_FEATURE (13)..(13): Xaa at position 13 is alpha-methyl-Leu
  MISC_FEATURE (16)..(16): Xaa at position 16 is Orn
  MISC_FEATURE (20)..(20): Xaa at position 20 is Aib
  MOD_RES (24)..(24): Lys at position 24 is chemically modified by conjugation of the epsilon-amino group of the Lys side chain with (2-[2-(2-amino-ethoxy)-ethoxy]-acetyl)2-(gamma-Glu)-(11-(4-carbox yphenoxy)undecanoyl
  MISC_FEATURE (25)..(25): Xaa at position 25 is alpha-methyl-Tyr
  MOD_RES (28)..(28): Lys at position 28 is chemically modified by conjugation of the epsilon-amino group of the Lys side chain with (2-[2-(2-amino-ethoxy)-ethoxy]-acetyl)2-(gamma-Glu)-(11-(4-carbox yphenoxy)undecanoyl
  MOD_RES (39)..(39): Ser at position 39 is amidated

SEQ ID NO: 322 - protein, 39 aa, Artificial Sequence; identical to SEQ ID NO: 243
  Synthetic Construct
  MISC_FEATURE (2)..(2): Xaa at position 2 is Aib
  MISC_FEATURE (6)..(6): Xaa at position 6 is alpha-methyl-Phe(2F)
  MISC_FEATURE (11)..(11): Xaa at position 11 is Aib
  MISC_FEATURE (13)..(13): Xaa at position 13 is alpha-methyl-Leu
  MISC_FEATURE (16)..(16): Xaa at position 16 is Orn
  MISC_FEATURE (20)..(20): Xaa at position 20 is Aib
  MOD_RES (24)..(24): Lys at position 24 is chemically modified by conjugation of the epsilon-amino group of the Lys side chain with (2-[2-(2-amino-ethoxy)-ethoxy]-acetyl)2-(gamma-Glu)-(11-(4-carbox yphenoxy)undecanoyl
  MISC_FEATURE (25)..(25): Xaa at position 25 is alpha-methyl-Tyr
  MOD_RES (28)..(28): Lys at position 28 is chemically modified by conjugation of the epsilon-amino group of the Lys side chain with (2-[2-(2-amino-ethoxy)-ethoxy]-acetyl)2-(gamma-Glu)-(11-(4-carbox yphenoxy)undecanoyl
  MOD_RES (39)..(39): Ser at position 39 is amidated

SEQ ID NO: 323 - protein, 39 aa, Artificial Sequence; identical to SEQ ID NO: 314
  Synthetic Construct
  MISC_FEATURE (2)..(2): Xaa at position 2 is Aib
  MISC_FEATURE (6)..(6): Xaa at position 6 is alpha-methyl-Phe(2F)
  MISC_FEATURE (11)..(11): Xaa at position 11 is Aib
  MISC_FEATURE (13)..(13): Xaa at position 13 is alpha-methyl-Leu
  MISC_FEATURE (16)..(16): Xaa at position 16 is Orn
  MISC_FEATURE (20)..(20): Xaa at position 20 is Aib
  MOD_RES (24)..(24): Lys at position 24 is chemically modified by conjugation of the epsilon-amino group of the Lys side chain with (2-[2-(2-amino-ethoxy)-ethoxy]-acetyl)2-(gamma-Glu)-(11-(4-carbox yphenoxy)undecanoyl
  MISC_FEATURE (25)..(25): Xaa at position 25 is alpha-methyl-Tyr
  MOD_RES (28)..(28): Lys at position 28 is chemically modified by conjugation of the epsilon-amino group of the Lys side chain with (2-[2-(2-amino-ethoxy)-ethoxy]-acetyl)2-(gamma-Glu)-(11-(4-carbox yphenoxy)undecanoyl
  MOD_RES (39)..(39): Ser at position 39 is amidated

SEQ ID NO: 324 - protein, 39 aa, Artificial Sequence; identical to SEQ ID NO: 80
  Synthetic Construct
  MISC_FEATURE (2)..(2): Xaa at position 2 is Aib
  MISC_FEATURE (6)..(6): Xaa at position 6 is alpha-methyl-Phe(2F)
  MISC_FEATURE (10)..(10): Xaa at position 10 is Nle
  MISC_FEATURE (13)..(13): Xaa at position 13 is alpha-methyl-Leu
  MISC_FEATURE (16)..(16): Xaa at position 16 is Orn
  MISC_FEATURE (20)..(20): Xaa at position 20 is Aib
  MOD_RES (24)..(24): Lys at position 24 is chemically modified by conjugation of the epsilon-amino group of the Lys side chain with (2-[2-(2-amino-ethoxy)-ethoxy]-acetyl)2-(gamma-Glu)-(10-(4-carbox yphenoxy)decanoyl)
  MISC_FEATURE (25)..(25): Xaa at position 25 is alpha-methyl-Tyr
  MOD_RES (28)..(28): Lys at position 28 is chemically modified by conjugation of the epsilon-amino group of the Lys side chain with (2-[2-(2-amino-ethoxy)-ethoxy]-acetyl)2-(gamma-Glu)-(10-(4-carbox yphenoxy)decanoyl)
  MOD_RES (39)..(39): Ser at position 39 is amidated

SEQ ID NO: 325 - protein, 39 aa, Artificial Sequence
  Synthetic Construct
  MISC_FEATURE (2)..(2): Xaa at position 2 is Aib
  MISC_FEATURE (6)..(6): Xaa at position 6 is alpha-methyl-Phe(2F)
  MISC_FEATURE (10)..(10): Xaa at position 10 is 4Pal
  MISC_FEATURE (11)..(11): Xaa at position 11 is Aib
  MISC_FEATURE (13)..(13): Xaa at position 13 is alpha-methyl-Leu
  MISC_FEATURE (16)..(16): Xaa at position 16 is Orn
  MISC_FEATURE (20)..(20): Xaa at position 20 is Aib
  MISC_FEATURE (21)..(21): Xaa at position 21 is Orn
  MOD_RES (24)..(24): Lys at position 24 is chemically modified by conjugation of the epsilon-amino group of the Lys side chain with (2-[2-(2-amino-ethoxy)-ethoxy]-acetyl)2-(gamma-Glu)-CO-(CH2)12-CO 2H
  MISC_FEATURE (25)..(25): Xaa at position 25 is alpha-methyl-Tyr
  MOD_RES (28)..(28): Lys at position 28 is chemically modified by conjugation of the epsilon-amino group of the Lys side chain with (2-[2-(2-amino-ethoxy)-ethoxy]-acetyl)2-(gamma-Glu)-CO-(CH2)12-CO 2H
  MOD_RES (39)..(39): Ser at position 39 is amidated
YXEGTXTSDXXIXLDXIAQXXFIKXLIKGGPSSGAPPPS

SEQ ID NO: 326 - protein, 39 aa, Artificial Sequence
  Synthetic Construct
  MISC_FEATURE (2)..(2): Xaa at position 2 is Aib
  MISC_FEATURE (6)..(6): Xaa at position 6 is alpha-methyl-Phe(2F)
  MISC_FEATURE (11)..(11): Xaa at position 11 is Aib
  MISC_FEATURE (13)..(13): Xaa at position 13 is alpha-methyl-Leu
  MISC_FEATURE (16)..(16): Xaa at position 16 is Orn
  MISC_FEATURE (20)..(20): Xaa at position 20 is Aib
  MISC_FEATURE (21)..(21): Xaa at position 21 is Orn
  MOD_RES (24)..(24): Lys at position 24 is chemically modified by conjugation of the epsilon-amino group of the Lys side chain with (2-[2-(2-amino-ethoxy)-ethoxy]-acetyl)2-(gamma-Glu)-CO-(CH2)12-CO 2H
  MISC_FEATURE (25)..(25): Xaa at position 25 is alpha-methyl-Tyr
  MOD_RES (28)..(28): Lys at position 28 is chemically modified by conjugation of the epsilon-amino group of the Lys side chain with (2-[2-(2-amino-ethoxy)-ethoxy]-acetyl)2-(gamma-Glu)-CO-(CH2)12-CO 2H
  MOD_RES (39)..(39): Ser at position 39 is amidated
YXEGTXTSDYXIXLDXIAQXXFIKXLIKGGPSSGAPPPS

SEQ ID NO: 327 - protein, 39 aa, Artificial Sequence
  Synthetic Construct
  MISC_FEATURE (2)..(2): Xaa at position 2 is Aib
  MISC_FEATURE (6)..(6): Xaa at position 6 is alpha-methyl-Phe(2F)
  MISC_FEATURE (11)..(11): Xaa at position 11 is Aib
  MISC_FEATURE (13)..(13): Xaa at position 13 is alpha-methyl-Leu
  MISC_FEATURE (16)..(16): Xaa at position 16 is Orn
  MISC_FEATURE (20)..(20): Xaa at position 20 is Aib
  MISC_FEATURE (21)..(21): Xaa at position 21 is Orn
  MOD_RES (24)..(24): Lys at position 24 is chemically modified by conjugation of the epsilon-amino group of the Lys side chain with (2-[2-(2-amino-ethoxy)-ethoxy]-acetyl)2-(gamma-Glu)-CO-(CH2)12-CO 2H
  MISC_FEATURE (25)..(25): Xaa at position 25 is alpha-methyl-Tyr
  MOD_RES (28)..(28): Lys at position 28 is chemically modified by conjugation of the epsilon-amino group of the Lys side chain with (2-[2-(2-amino-ethoxy)-ethoxy]-acetyl)2-(gamma-Glu)-CO-(CH2)12-CO 2H
  MOD_RES (39)..(39): Ser at position 39 is amidated
YXEGTXTSDVXIXLDXIAQXXFIKXLIKGGPSSGAPPPS

SEQ ID NO: 328 - protein, 39 aa, Artificial Sequence
  Synthetic Construct
  MISC_FEATURE (2)..(2): Xaa at position 2 is Aib
  MISC_FEATURE (6)..(6): Xaa at position 6 is alpha-methyl-Phe(2F)
  MISC_FEATURE (11)..(11): Xaa at position 11 is Aib
  MISC_FEATURE (13)..(13): Xaa at position 13 is alpha-methyl-Leu
  MISC_FEATURE (16)..(16): Xaa at position 16 is Orn
  MOD_RES (17)..(17): Lys at position 17 is chemically modified by conjugation of the epsilon-amino group of the Lys side chain with (2-[2-(2-amino-ethoxy)-ethoxy]-acetyl)2-(gamma-Glu)-CO-(CH2)12-CO 2H
  MISC_FEATURE (20)..(20): Xaa at position 20 is Aib
  MOD_RES (21)..(21): Lys at position 21 is chemically modified by conjugation of the epsilon-amino group of the Lys side chain with (2-[2-(2-amino-ethoxy)-ethoxy]-acetyl)2-(gamma-Glu)-CO-(CH2)12-CO 2H
  MISC_FEATURE (24)..(24): Xaa at position 24 is D-Glu
  MISC_FEATURE (25)..(25): Xaa at position 25 is alpha-methyl-Tyr
  MOD_RES (39)..(39): Ser at position 39 is amidated
YXEGTXTSDVXIXLDXKAQXKFIXXLIEGGPSSGAPPPS

SEQ ID NO: 329 - protein, 39 aa, Artificial Sequence; identical to SEQ ID NO: 328
  Synthetic Construct
  MISC_FEATURE (2)..(2): Xaa at position 2 is Aib
  MISC_FEATURE (6)..(6): Xaa at position 6 is alpha-methyl-Phe(2F)
  MISC_FEATURE (11)..(11): Xaa at position 11 is Aib
  MISC_FEATURE (13)..(13): Xaa at position 13 is alpha-methyl-Leu
  MISC_FEATURE (16)..(16): Xaa at position 16 is Orn
  MOD_RES (17)..(17): Lys at position 17 is chemically modified by conjugation of the epsilon-amino group of the Lys side chain with (2-[2-(2-amino-ethoxy)-ethoxy]-acetyl)2-(gamma-Glu)-(10-(4-carbox yphenoxy)decanoyl)
  MISC_FEATURE (20)..(20): Xaa at position 20 is Aib
  MOD_RES (21)..(21): Lys at position 21 is chemically modified by conjugation of the epsilon-amino group of the Lys side chain with (2-[2-(2-amino-ethoxy)-ethoxy]-acetyl)2-(gamma-Glu)-(10-(4-carbox yphenoxy)decanoyl)
  MISC_FEATURE (24)..(24): Xaa at position 24 is D-Glu
  MISC_FEATURE (25)..(25): Xaa at position 25 is alpha-methyl-Tyr
  MOD_RES (39)..(39): Ser at position 39 is amidated

SEQ ID NO: 330 - protein, 39 aa, Artificial Sequence; identical to SEQ ID NO: 25
  Synthetic Construct
  MISC_FEATURE (2)..(2): Xaa at position 2 is Aib
  MISC_FEATURE (6)..(6): Xaa at position 6 is alpha-methyl-Phe(2F)
  MISC_FEATURE (10)..(10): Xaa at position 10 is hTyr
  MISC_FEATURE (13)..(13): Xaa at position 13 is alpha-methyl-Leu
  MISC_FEATURE (16)..(16): Xaa at position 16 is Orn
  MOD_RES (17)..(17): Lys at position 17 is chemically modified by conjugation of the epsilon-amino group of the Lys side chain with (2-[2-(2-amino-ethoxy)-ethoxy]-acetyl)2-(gamma-Glu)-(10-(4-carbox yphenoxy)decanoyl)
  MISC_FEATURE (20)..(20): Xaa at position 20 is Aib
  MOD_RES (21)..(21): Lys at position 21 is chemically modified by conjugation of the epsilon-amino group of the Lys side chain with (2-[2-(2-amino-ethoxy)-ethoxy]-acetyl)2-(gamma-Glu)-(10-(4-carbox yphenoxy)decanoyl)
  MISC_FEATURE (24)..(24): Xaa at position 24 is D-Glu
  MISC_FEATURE (25)..(25): Xaa at position 25 is alpha-methyl-Tyr
  MOD_RES (39)..(39): Ser at position 39 is amidated

SEQ ID NO: 331 - protein, 39 aa, Artificial Sequence; identical to SEQ ID NO: 25
  Synthetic Construct
  MISC_FEATURE (2)..(2): Xaa at position 2 is Aib
  MISC_FEATURE (6)..(6): Xaa at position 6 is alpha-methyl-Phe(2F)
  MISC_FEATURE (10)..(10): Xaa at position 10 is Nle
  MISC_FEATURE (13)..(13): Xaa at position 13 is alpha-methyl-Leu
  MISC_FEATURE (16)..(16): Xaa at position 16 is Orn
  MOD_RES (17)..(17): Lys at position 17 is chemically modified by conjugation of the epsilon-amino group of the Lys side chain with (2-[2-(2-amino-ethoxy)-ethoxy]-acetyl)2-(gamma-Glu)-(10-(4-carbox yphenoxy)decanoyl)
  MISC_FEATURE (20)..(20): Xaa at position 20 is Aib
  MOD_RES (21)..(21): Lys at position 21 is chemically modified by conjugation of the epsilon-amino group of the Lys side chain with (2-[2-(2-amino-ethoxy)-ethoxy]-acetyl)2-(gamma-Glu)-(10-(4-carbox yphenoxy)decanoyl)
  MISC_FEATURE (24)..(24): Xaa at position 24 is D-Glu
  MISC_FEATURE (25)..(25): Xaa at position 25 is alpha-methyl-Tyr
  MOD_RES (39)..(39): Ser at position 39 is amidated

SEQ ID NO: 332 - protein, 39 aa, Artificial Sequence; identical to SEQ ID NO: 253
  Synthetic Construct
  MISC_FEATURE (2)..(2): Xaa at position 2 is Aib
  MISC_FEATURE (6)..(6): Xaa at position 6 is alpha-methyl-Phe(2F)
  MISC_FEATURE (10)..(10): Xaa at position 10 is 4Pal
  MISC_FEATURE (11)..(11): Xaa at position 11 is Aib
  MISC_FEATURE (13)..(13): Xaa at position 13 is alpha-methyl-Leu
  MISC_FEATURE (16)..(16): Xaa at position 16 is Orn
  MOD_RES (17)..(17): Lys at position 17 is chemically modified by conjugation of the epsilon-amino group of the Lys side chain with (2-[2-(2-amino-ethoxy)-ethoxy]-acetyl)2-(gamma-Glu)-(10-(4-carbox yphenoxy)decanoyl)
  MISC_FEATURE (20)..(20): Xaa at position 20 is Aib
  MOD_RES (21)..(21): Lys at position 21 is chemically modified by conjugation of the epsilon-amino group of the Lys side chain with (2-[2-(2-amino-ethoxy)-ethoxy]-acetyl)2-(gamma-Glu)-(10-(4-carbox yphenoxy)decanoyl)
  MISC_FEATURE (24)..(24): Xaa at position 24 is D-Glu
  MISC_FEATURE (25)..(25): Xaa at position 25 is alpha-methyl-Tyr
  MOD_RES (39)..(39): Ser at position 39 is amidated

SEQ ID NO: 333 - protein, 39 aa, Artificial Sequence; identical to SEQ ID NO: 25
  Synthetic Construct
  MISC_FEATURE (2)..(2): Xaa at position 2 is Aib
  MISC_FEATURE (6)..(6): Xaa at position 6 is alpha-methyl-Phe(2F)
  MISC_FEATURE (10)..(10): Xaa at position 10 is hTyr
  MISC_FEATURE (13)..(13): Xaa at position 13 is alpha-methyl-Leu
  MISC_FEATURE (16)..(16): Xaa at position 16 is Orn
  MOD_RES (17)..(17): Lys at position 17 is chemically modified by conjugation of the epsilon-amino group of the Lys side chain with (2-[2-(2-amino-ethoxy)-ethoxy]-acetyl)2-(gamma-Glu)-CO-(CH2)10-CH 3
  MISC_FEATURE (20)..(20): Xaa at position 20 is Aib
  MOD_RES (21)..(21): Lys at position 21 is chemically modified by conjugation of the epsilon-amino group of the Lys side chain with (2-[2-(2-amino-ethoxy)-ethoxy]-acetyl)2-(gamma-Glu)-CO-(CH2)10-CH 3
  MISC_FEATURE (24)..(24): Xaa at position 24 is D-Glu
  MISC_FEATURE (25)..(25): Xaa at position 25 is alpha-methyl-Tyr
  MOD_RES (39)..(39): Ser at position 39 is amidated

SEQ ID NO: 334 - protein, 40 aa, Artificial Sequence; identical to SEQ ID NO: 255
  Synthetic Construct
  MISC_FEATURE (2)..(2): Xaa at position 2 is Aib
  MISC_FEATURE (6)..(6): Xaa at position 6 is alpha-methyl-Phe(2F)
  MISC_FEATURE (10)..(10): Xaa at position 10 is 4Pal
  MISC_FEATURE (11)..(11): Xaa at position 11 is Aib
  MISC_FEATURE (13)..(13): Xaa at position 13 is alpha-methyl-Leu
  MISC_FEATURE (16)..(16): Xaa at position 16 is Orn
  MOD_RES (17)..(17): Lys at position 17 is chemically modified by conjugation of the epsilon-amino group of the Lys side chain with (2-[2-(2-amino-ethoxy)-ethoxy]-acetyl)2-(gamma-Glu)-CO-(CH2)10-CH 3
  MISC_FEATURE (20)..(20): Xaa at position 20 is Aib
  MISC_FEATURE (24)..(24): Xaa at position 24 is D-Glu
  MISC_FEATURE (25)..(25): Xaa at position 25 is alpha-methyl-Tyr
  MOD_RES (40)..(40): Lys at position 40 is chemically modified by conjugation of the epsilon-amino group of the Lys side chain with (2-[2-(2-amino-ethoxy)-ethoxy]-acetyl)2-(gamma-Glu)-CO-(CH2)10-CH 3
  MOD_RES (40)..(40): Lys at position 40 is amidated

SEQ ID NO: 335 - protein, 39 aa, Artificial Sequence
  Synthetic Construct
  MISC_FEATURE (2)..(2): Xaa at position 2 is Aib
  MISC_FEATURE (6)..(6): Xaa at position 6 is alpha-methyl-Phe(2F)
  MISC_FEATURE (11)..(11): Xaa at position 11 is Aib
  MISC_FEATURE (13)..(13): Xaa at position 13 is alpha-methyl-Leu
  MISC_FEATURE (16)..(16): Xaa at position 16 is Orn
  MOD_RES (17)..(17): Lys at position 17 is chemically modified by conjugation of the epsilon-amino group of the Lys side chain with (2-[2-(2-amino-ethoxy)-ethoxy]-acetyl)2-(gamma-Glu)-CO-(CH2)12-CO 2H
  MISC_FEATURE (20)..(20): Xaa at position 20 is Aib
  MISC_FEATURE (24)..(24): Xaa at position 24 is D-Glu
  MISC_FEATURE (25)..(25): Xaa at position 25 is alpha-methyl-Tyr
  MOD_RES (28)..(28): Lys at position 28 is chemically modified by conjugation of the epsilon-amino group of the Lys side chain with (2-[2-(2-amino-ethoxy)-ethoxy]-acetyl)2-(gamma-Glu)-CO-(CH2)12-CO 2H
  MOD_RES (39)..(39): Ser at position 39 is amidated
YXEGTXTSDVXIXLDXKAQXEFIXXLIKGGPSSGAPPPS

SEQ ID NO: 336 - protein, 39 aa, Artificial Sequence; identical to SEQ ID NO: 335
  Synthetic Construct
  MISC_FEATURE (2)..(2): Xaa at position 2 is Aib
  MISC_FEATURE (6)..(6): Xaa at position 6 is alpha-methyl-Phe(2F)
  MISC_FEATURE (11)..(11): Xaa at position 11 is Aib
  MISC_FEATURE (13)..(13): Xaa at position 13 is alpha-methyl-Leu
  MISC_FEATURE (16)..(16): Xaa at position 16 is Orn
  MOD_RES (17)..(17): Lys at position 17 is chemically modified by conjugation of the epsilon-amino group of the Lys side chain with (2-[2-(2-amino-ethoxy)-ethoxy]-acetyl)2-(gamma-Glu)-(10-(4-carbox yphenoxy)decanoyl)
  MISC_FEATURE (20)..(20): Xaa at position 20 is Aib
  MISC_FEATURE (24)..(24): Xaa at position 24 is D-Glu
  MISC_FEATURE (25)..(25): Xaa at position 25 is alpha-methyl-Tyr
  MOD_RES (28)..(28): Lys at position 28 is chemically modified by conjugation of the epsilon-amino group of the Lys side chain with (2-[2-(2-amino-ethoxy)-ethoxy]-acetyl)2-(gamma-Glu)-(10-(4-carbox yphenoxy)decanoyl)
  MOD_RES (39)..(39): Ser at position 39 is amidated

SEQ ID NO: 337 - protein, 39 aa, Artificial Sequence; identical to SEQ ID NO: 27
  Synthetic Construct
  MISC_FEATURE (2)..(2): Xaa at position 2 is Aib
  MISC_FEATURE (6)..(6): Xaa at position 6 is alpha-methyl-Phe(2F)
  MISC_FEATURE (10)..(10): Xaa at position 10 is hTyr
  MISC_FEATURE (13)..(13): Xaa at position 13 is alpha-methyl-Leu
  MISC_FEATURE (16)..(16): Xaa at position 16 is Orn
  MOD_RES (17)..(17): Lys at position 17 is chemically modified by conjugation of the epsilon-amino group of the Lys side chain with (2-[2-(2-amino-ethoxy)-ethoxy]-acetyl)2-(gamma-Glu)-(10-(4-carbox yphenoxy)decanoyl)
  MISC_FEATURE (20)..(20): Xaa at position 20 is Aib
  MISC_FEATURE (24)..(24): Xaa at position 24 is D-Glu
  MISC_FEATURE (25)..(25): Xaa at position 25 is alpha-methyl-Tyr
  MOD_RES (28)..(28): Lys at position 28 is chemically modified by conjugation of the epsilon-amino group of the Lys side chain with (2-[2-(2-amino-ethoxy)-ethoxy]-acetyl)2-(gamma-Glu)-(10-(4-carbox yphenoxy)decanoyl)
  MOD_RES (39)..(39): Ser at position 39 is amidated

SEQ ID NO: 338 - protein, 39 aa, Artificial Sequence; identical to SEQ ID NO: 27
  Synthetic Construct
  MISC_FEATURE (2)..(2): Xaa at position 2 is Aib
  MISC_FEATURE (6)..(6): Xaa at position 6 is alpha-methyl-Phe(2F)
  MISC_FEATURE (10)..(10): Xaa at position 10 is Nle
  MISC_FEATURE (13)..(13): Xaa at position 13 is alpha-methyl-Leu
  MISC_FEATURE (16)..(16): Xaa at position 16 is Orn
  MOD_RES (17)..(17): Lys at position 17 is chemically modified by conjugation of the epsilon-amino group of the Lys side chain with (2-[2-(2-amino-ethoxy)-ethoxy]-acetyl)2-(gamma-Glu)-(10-(4-carbox yphenoxy)decanoyl)
  MISC_FEATURE (20)..(20): Xaa at position 20 is Aib
  MISC_FEATURE (24)..(24): Xaa at position 24 is D-Glu
  MISC_FEATURE (25)..(25): Xaa at position 25 is alpha-methyl-Tyr
  MOD_RES (28)..(28): Lys at position 28 is chemically modified by conjugation of the epsilon-amino group of the Lys side chain with (2-[2-(2-amino-ethoxy)-ethoxy]-acetyl)2-(gamma-Glu)-(10-(4-carbox yphenoxy)decanoyl)
  MOD_RES (39)..(39): Ser at position 39 is amidated

SEQ ID NO: 339 - protein, 39 aa, Artificial Sequence
  Synthetic Construct
  MISC_FEATURE (2)..(2): Xaa at position 2 is Aib
  MISC_FEATURE (6)..(6): Xaa at position 6 is alpha-methyl-Phe(2F)
  MISC_FEATURE (11)..(11): Xaa at position 11 is Aib
  MISC_FEATURE (13)..(13): Xaa at position 13 is alpha-methyl-Leu
  MISC_FEATURE (16)..(16): Xaa at position 16 is Orn
  MISC_FEATURE (20)..(20): Xaa at position 20 is Aib
  MOD_RES (21)..(21): Lys at position 21 is chemically modified by conjugation of the epsilon-amino group of the Lys side chain with (2-[2-(2-amino-ethoxy)-ethoxy]-acetyl)2-(gamma-Glu)-CO-(CH2)12-CO 2H
  MISC_FEATURE (24)..(24): Xaa at position 24 is D-Glu
  MISC_FEATURE (25)..(25): Xaa at position 25 is alpha-methyl-Tyr
  MOD_RES (28)..(28): Lys at position 28 is chemically modified by conjugation of the epsilon-amino group of the Lys side chain with (2-[2-(2-amino-ethoxy)-ethoxy]-acetyl)2-(gamma-Glu)-CO-(CH2)12-CO 2H
  MOD_RES (39)..(39): Ser at position 39 is amidated
YXEGTXTSDVXIXLDXIAQXKFIXXLIKGGPSSGAPPPS

SEQ ID NO: 340 - protein, 39 aa, Artificial Sequence; identical to SEQ ID NO: 339
  Synthetic Construct
  MISC_FEATURE (2)..(2): Xaa at position 2 is Aib
  MISC_FEATURE (6)..(6): Xaa at position 6 is alpha-methyl-Phe(2F)
  MISC_FEATURE (11)..(11): Xaa at position 11 is Aib
  MISC_FEATURE (13)..(13): Xaa at position 13 is alpha-methyl-Leu
  MISC_FEATURE (16)..(16): Xaa at position 16 is Orn
  MISC_FEATURE (20)..(20): Xaa at position 20 is Aib
  MOD_RES (21)..(21): Lys at position 21 is chemically modified by conjugation of the epsilon-amino group of the Lys side chain with (2-[2-(2-amino-ethoxy)-ethoxy]-acetyl)2-(gamma-Glu)-(10-(4-carbox yphenoxy)decanoyl)
  MISC_FEATURE (24)..(24): Xaa at position 24 is D-Glu
  MISC_FEATURE (25)..(25): Xaa at position 25 is alpha-methyl-Tyr
  MOD_RES (28)..(28): Lys at position 28 is chemically modified by conjugation of the epsilon-amino group of the Lys side chain with (2-[2-(2-amino-ethoxy)-ethoxy]-acetyl)2-(gamma-Glu)-(10-(4-carbox yphenoxy)decanoyl)
  MOD_RES (39)..(39): Ser at position 39 is amidated

SEQ ID NO: 341 - protein, 39 aa, Artificial Sequence; identical to SEQ ID NO: 227
  Synthetic Construct
  MISC_FEATURE (2)..(2): Xaa at position 2 is Aib
  MISC_FEATURE (6)..(6): Xaa at position 6 is alpha-methyl-Phe(2F)
  MISC_FEATURE (10)..(10): Xaa at position 10 is 4Pal
  MISC_FEATURE (11)..(11): Xaa at position 11 is Aib
  MISC_FEATURE (13)..(13): Xaa at position 13 is alpha-methyl-Leu
  MISC_FEATURE (16)..(16): Xaa at position 16 is Orn
  MISC_FEATURE (20)..(20): Xaa at position 20 is Aib
  MOD_RES (21)..(21): Lys at position 21 is chemically modified by conjugation of the epsilon-amino group of the Lys side chain with (2-[2-(2-amino-ethoxy)-ethoxy]-acetyl)2-(gamma-Glu)-(11-(4-carbox yphenoxy)undecanoyl
  MISC_FEATURE (24)..(24): Xaa at position 24 is D-Glu
  MISC_FEATURE (25)..(25): Xaa at position 25 is alpha-methyl-Tyr
  MOD_RES (28)..(28): Lys at position 28 is chemically modified by conjugation of the epsilon-amino group of the Lys side chain with (2-[2-(2-amino-ethoxy)-ethoxy]-acetyl)2-(gamma-Glu)-(11-(4-carbox yphenoxy)undecanoyl
  MOD_RES (39)..(39): Ser at position 39 is amidated

SEQ ID NO: 342 - protein, 39 aa, Artificial Sequence; identical to SEQ ID NO: 83
  Synthetic Construct
  MISC_FEATURE (2)..(2): Xaa at position 2 is Aib
  MISC_FEATURE (6)..(6): Xaa at position 6 is alpha-methyl-Phe(2F)
  MISC_FEATURE (10)..(10): Xaa at position 10 is hTyr
  MISC_FEATURE (13)..(13): Xaa at position 13 is alpha-methyl-Leu
  MISC_FEATURE (16)..(16): Xaa at position 16 is Orn
  MISC_FEATURE (20)..(20): Xaa at position 20 is Aib
  MOD_RES (21)..(21): Lys at position 21 is chemically modified by conjugation of the epsilon-amino group of the Lys side chain with (2-[2-(2-amino-ethoxy)-ethoxy]-acetyl)2-(gamma-Glu)-(10-(4-carbox yphenoxy)decanoyl)
  MISC_FEATURE (24)..(24): Xaa at position 24 is D-Glu
  MISC_FEATURE (25)..(25): Xaa at position 25 is alpha-methyl-Tyr
  MOD_RES (28)..(28): Lys at position 28 is chemically modified by conjugation of the epsilon-amino group of the Lys side chain with (2-[2-(2-amino-ethoxy)-ethoxy]-acetyl)2-(gamma-Glu)-(10-(4-carbox yphenoxy)decanoyl)
  MOD_RES (39)..(39): Ser at position 39 is amidated

SEQ ID NO: 343 - protein, 39 aa, Artificial Sequence; identical to SEQ ID NO: 83
  Synthetic Construct
  MISC_FEATURE (2)..(2): Xaa at position 2 is Aib
  MISC_FEATURE (6)..(6): Xaa at position 6 is alpha-methyl-Phe(2F)
  MISC_FEATURE (10)..(10): Xaa at position 10 is Nle
  MISC_FEATURE (13)..(13): Xaa at position 13 is alpha-methyl-Leu
  MISC_FEATURE (16)..(16): Xaa at position 16 is Orn
  MISC_FEATURE (20)..(20): Xaa at position 20 is Aib
  MOD_RES (21)..(21): Lys at position 21 is chemically modified by conjugation of the epsilon-amino group of the Lys side chain with (2-[2-(2-amino-ethoxy)-ethoxy]-acetyl)2-(gamma-Glu)-(10-(4-carbox yphenoxy)decanoyl)
  MISC_FEATURE (24)..(24): Xaa at position 24 is D-Glu
  MISC_FEATURE (25)..(25): Xaa at position 25 is alpha-methyl-Tyr
  MOD_RES (28)..(28): Lys at position 28 is chemically modified by conjugation of the epsilon-amino group of the Lys side chain with (2-[2-(2-amino-ethoxy)-ethoxy]-acetyl)2-(gamma-Glu)-(10-(4-carbox yphenoxy)decanoyl)
  MOD_RES (39)..(39): Ser at position 39 is amidated

SEQ ID NO: 344 - protein, 39 aa, Artificial Sequence; identical to SEQ ID NO: 254
  Synthetic Construct
  MISC_FEATURE (2)..(2): Xaa at position 2 is Aib
  MISC_FEATURE (6)..(6): Xaa at position 6 is alpha-methyl-Phe(2F)
  MISC_FEATURE (10)..(10): Xaa at position 10 is 4Pal
  MISC_FEATURE (11)..(11): Xaa at position 11 is Aib
  MISC_FEATURE (13)..(13): Xaa at position 13 is alpha-methyl-Leu
  MISC_FEATURE (16)..(16): Xaa at position 16 is Orn
  MOD_RES (17)..(17): Lys at position 17 is chemically modified by conjugation of the epsilon-amino group of the Lys side chain with (2-[2-(2-amino-ethoxy)-ethoxy]-acetyl)2-(gamma-Glu)-CO-(CH2)10-CH 3
  MISC_FEATURE (20)..(20): Xaa at position 20 is Aib
  MISC_FEATURE (24)..(24): Xaa at position 24 is D-Glu
  MISC_FEATURE (25)..(25): Xaa at position 25 is alpha-methyl-Tyr
  MOD_RES (28)..(28): Lys at position 28 is chemically modified by conjugation of the epsilon-amino group of the Lys side chain with (2-[2-(2-amino-ethoxy)-ethoxy]-acetyl)2-(gamma-Glu)-CO-(CH2)10-CH 3
  MOD_RES (39)..(39): Ser at position 39 is amidated

SEQ ID NO: 345 - protein, 39 aa, Artificial Sequence; identical to SEQ ID NO: 27
  Synthetic Construct
  MISC_FEATURE (2)..(2): Xaa at position 2 is Aib
  MISC_FEATURE (6)..(6): Xaa at position 6 is alpha-methyl-Phe(2F)
  MISC_FEATURE (10)..(10): Xaa at position 10 is hTyr
  MISC_FEATURE (13)..(13): Xaa at position 13 is alpha-methyl-Leu
  MISC_FEATURE (16)..(16): Xaa at position 16 is Orn
  MOD_RES (17)..(17): Lys at position 17 is chemically modified by conjugation of the epsilon-amino group of the Lys side chain with (2-[2-(2-amino-ethoxy)-ethoxy]-acetyl)2-(gamma-Glu)-CO-(CH2)10-CH 3
  MISC_FEATURE (20)..(20): Xaa at position 20 is Aib
  MISC_FEATURE (24)..(24): Xaa at position 24 is D-Glu
  MISC_FEATURE (25)..(25): Xaa at position 25 is alpha-methyl-Tyr
  MOD_RES (28)..(28): Lys at position 28 is chemically modified by conjugation of the epsilon-amino group of the Lys side chain with (2-[2-(2-amino-ethoxy)-ethoxy]-acetyl)2-(gamma-Glu)-CO-(CH2)10-CH 3
  MOD_RES (39)..(39): Ser at position 39 is amidated

SEQ ID NO: 346 - protein, 39 aa, Artificial Sequence; identical to SEQ ID NO: 253
  Synthetic Construct
  MISC_FEATURE (2)..(2): Xaa at position 2 is Aib
  MISC_FEATURE (6)..(6): Xaa at position 6 is alpha-methyl-Phe(2F)
  MISC_FEATURE (10)..(10): Xaa at position 10 is 4Pal
  MISC_FEATURE (11)..(11): Xaa at position 11 is Aib
  MISC_FEATURE (13)..(13): Xaa at position 13 is alpha-methyl-Leu
  MISC_FEATURE (16)..(16): Xaa at position 16 is Orn
  MOD_RES (17)..(17): Lys at position 17 is chemically modified by conjugation of the epsilon-amino group of the Lys side chain with (2-[2-(2-amino-ethoxy)-ethoxy]-acetyl)-(gamma-Glu)-CO-(CH2)12-CO2 H
  MISC_FEATURE (20)..(20): Xaa at position 20 is Aib
  MOD_RES (21)..(21): Lys at position 21 is chemically modified by conjugation of the epsilon-amino group of the Lys side chain with (2-[2-(2-amino-ethoxy)-ethoxy]-acetyl)-(gamma-Glu)-CO-(CH2)12-CO2 H
  MISC_FEATURE (24)..(24): Xaa at position 24 is D-Glu
  MISC_FEATURE (25)..(25): Xaa at position 25 is alpha-methyl-Tyr
  MOD_RES (39)..(39): Ser at position 39 is amidated

SEQ ID NO: 347 - protein, 39 aa, Artificial Sequence; identical to SEQ ID NO: 254
  Synthetic Construct
  MISC_FEATURE (2)..(2): Xaa at position 2 is Aib
  MISC_FEATURE (6)..(6): Xaa at position 6 is alpha-methyl-Phe(2F)
  MISC_FEATURE (10)..(10): Xaa at position 10 is 4Pal
  MISC_FEATURE (11)..(11): Xaa at position 11 is Aib
  MISC_FEATURE (13)..(13): Xaa at position 13 is alpha-methyl-Leu
  MISC_FEATURE (16)..(16): Xaa at position 16 is Orn
  MOD_RES (17)..(17): Lys at position 17 is chemically modified by conjugation of the epsilon-amino group of the Lys side chain with (2-[2-(2-amino-ethoxy)-ethoxy]-acetyl)-(gamma-Glu)-CO-(CH2)12-CO2 H
  MISC_FEATURE (20)..(20): Xaa at position 20 is Aib
  MISC_FEATURE (24)..(24): Xaa at position 24 is D-Glu
  MISC_FEATURE (25)..(25): Xaa at position 25 is alpha-methyl-Tyr
  MOD_RES (28)..(28): Lys at position 28 is chemically modified by conjugation of the epsilon-amino group of the Lys side chain with (2-[2-(2-amino-ethoxy)-ethoxy]-acetyl)-(gamma-Glu)-CO-(CH2)12-CO2 H
  MOD_RES (39)..(39): Ser at position 39 is amidated

SEQ ID NO: 348 - protein, 40 aa, Artificial Sequence; identical to SEQ ID NO: 255
  Synthetic Construct
  MISC_FEATURE (2)..(2): Xaa at position 2 is Aib
  MISC_FEATURE (6)..(6): Xaa at position 6 is alpha-methyl-Phe(2F)
  MISC_FEATURE (10)..(10): Xaa at position 10 is 4Pal
  MISC_FEATURE (11)..(11): Xaa at position 11 is Aib
  MISC_FEATURE (13)..(13): Xaa at position 13 is alpha-methyl-Leu
  MISC_FEATURE (16)..(16): Xaa at position 16 is Orn
  MOD_RES (17)..(17): Lys at position 17 is chemically modified by conjugation of the epsilon-amino group of the Lys side chain with (2-[2-(2-amino-ethoxy)-ethoxy]-acetyl)-(gamma-Glu)-CO-(CH2)12-CO2 H
  MISC_FEATURE (20)..(20): Xaa at position 20 is Aib
  MISC_FEATURE (24)..(24): Xaa at position 24 is D-Glu
  MISC_FEATURE (25)..(25): Xaa at position 25 is alpha-methyl-Tyr
  MOD_RES (40)..(40): Lys at position 40 is chemically modified by conjugation of the epsilon-amino group of the Lys side chain with (2-[2-(2-amino-ethoxy)-ethoxy]-acetyl)-(gamma-Glu)-CO-(CH2)12-CO2 H
  MOD_RES (40)..(40): Lys at position 40 is amidated

SEQ ID NO: 349 - protein, 39 aa, Artificial Sequence; identical to SEQ ID NO: 226
  Synthetic Construct
  MISC_FEATURE (2)..(2): Xaa at position 2 is Aib
  MISC_FEATURE (6)..(6): Xaa at position 6 is alpha-methyl-Phe(2F)
  MISC_FEATURE (10)..(10): Xaa at position 10 is 4Pal
  MISC_FEATURE (11)..(11): Xaa at position 11 is Aib
  MISC_FEATURE (13)..(13): Xaa at position 13 is alpha-methyl-Leu
  MISC_FEATURE (16)..(16): Xaa at position 16 is Orn
  MISC_FEATURE (20)..(20): Xaa at position 20 is Aib
  MOD_RES (24)..(24): Lys at position 24 is chemically modified by conjugation of the epsilon-amino group of the Lys side chain with (2-[2-(2-amino-ethoxy)-ethoxy]-acetyl)-(gamma-Glu)-CO-(CH2)12-CO2 H
  MISC_FEATURE (25)..(25): Xaa at position 25 is alpha-methyl-Tyr
  MOD_RES (28)..(28): Lys at position 28 is chemically modified by conjugation of the epsilon-amino group of the Lys side chain with (2-[2-(2-amino-ethoxy)-ethoxy]-acetyl)-(gamma-Glu)-CO-(CH2)12-CO2 H
  MOD_RES (39)..(39): Ser at position 39 is amidated

SEQ ID NO: 350 - protein, 39 aa, Artificial Sequence; identical to SEQ ID NO: 227
  Synthetic Construct
  MISC_FEATURE (2)..(2): Xaa at position 2 is Aib
  MISC_FEATURE (6)..(6): Xaa at position 6 is alpha-methyl-Phe(2F)
  MISC_FEATURE (10)..(10): Xaa at position 10 is 4Pal
  MISC_FEATURE (11)..(11): Xaa at position 11 is Aib
  MISC_FEATURE (13)..(13): Xaa at position 13 is alpha-methyl-Leu
  MISC_FEATURE (16)..(16): Xaa at position 16 is Orn
  MISC_FEATURE (20)..(20): Xaa at position 20 is Aib
  MOD_RES (21)..(21): Lys at position 21 is chemically modified by conjugation of the epsilon-amino group of the Lys side chain with (2-[2-(2-amino-ethoxy)-ethoxy]-acetyl)-(gamma-Glu)-CO-(CH2)12-CO2 H
  MISC_FEATURE (24)..(24): Xaa at position 24 is D-Glu
  MISC_FEATURE (25)..(25): Xaa at position 25 is alpha-methyl-Tyr
  MOD_RES (28)..(28): Lys at position 28 is chemically modified by conjugation of the epsilon-amino group of the Lys side chain with (2-[2-(2-amino-ethoxy)-ethoxy]-acetyl)-(gamma-Glu)-CO-(CH2)12-CO2 H
  MOD_RES (39)..(39): Ser at position 39 is amidated

SEQ ID NO: 351 - protein, 40 aa, Artificial Sequence; identical to SEQ ID NO: 252
  Synthetic Construct
  MISC_FEATURE (2)..(2): Xaa at position 2 is Aib
  MISC_FEATURE (6)..(6): Xaa at position 6 is alpha-methyl-Phe(2F)
  MISC_FEATURE (10)..(10): Xaa at position 10 is 4Pal
  MISC_FEATURE (11)..(11): Xaa at position 11 is Aib
  MISC_FEATURE (13)..(13): Xaa at position 13 is alpha-methyl-Leu
  MISC_FEATURE (16)..(16): Xaa at position 16 is Orn
  MISC_FEATURE (20)..(20): Xaa at position 20 is Aib
  MOD_RES (21)..(21): Lys at position 21 is chemically modified by conjugation of the epsilon-amino group of the Lys side chain with (2-[2-(2-amino-ethoxy)-ethoxy]-acetyl)-(gamma-Glu)-CO-(CH2)12-CO2 H
  MISC_FEATURE (24)..(24): Xaa at position 24 is D-Glu
  MISC_FEATURE (25)..(25): Xaa at position 25 is alpha-methyl-Tyr
  MOD_RES (40)..(40): Lys at position 40 is chemically modified by conjugation of the epsilon-amino group of the Lys side chain with (2-[2-(2-amino-ethoxy)-ethoxy]-acetyl)-(gamma-Glu)-CO-(CH2)12-CO2 H
  MOD_RES (40)..(40): Lys at position 40 is amidated

SEQ ID NO: 352 - protein, 39 aa, Artificial Sequence; identical to SEQ ID NO: 226
  Synthetic Construct
  MISC_FEATURE (2)..(2): Xaa at position 2 is Aib
  MISC_FEATURE (6)..(6): Xaa at position 6 is alpha-methyl-Phe(2F)
  MISC_FEATURE (10)..(10): Xaa at position 10 is 4Pal
  MISC_FEATURE (11)..(11): Xaa at position 11 is Aib
  MISC_FEATURE (13)..(13): Xaa at position 13 is alpha-methyl-Leu
  MISC_FEATURE (16)..(16): Xaa at position 16 is Orn
  MISC_FEATURE (20)..(20): Xaa at position 20 is Aib
  MOD_RES (24)..(24): Lys at position 24 is chemically modified by conjugation of the epsilon-amino group of the Lys side chain with (2-[2-(2-amino-ethoxy)-ethoxy]-acetyl)3-(gamma-Glu)-CO-(CH2)12-CO 2H
  MISC_FEATURE (25)..(25): Xaa at position 25 is alpha-methyl-Tyr
  MOD_RES (28)..(28): Lys at position 28 is chemically modified by conjugation of the epsilon-amino group of the Lys side chain with (2-[2-(2-amino-ethoxy)-ethoxy]-acetyl)3-(gamma-Glu)-CO-(CH2)12-CO 2H
  MOD_RES (39)..(39): Ser at position 39 is amidated

SEQ ID NO: 353 - protein, 39 aa, Artificial Sequence; identical to SEQ ID NO: 243
  Synthetic Construct
  MISC_FEATURE (2)..(2): Xaa at position 2 is Aib
  MISC_FEATURE (6)..(6): Xaa at position 6 is alpha-methyl-Phe(2F)
  MISC_FEATURE (11)..(11): Xaa at position 11 is Aib
  MISC_FEATURE (13)..(13): Xaa at position 13 is alpha-methyl-Leu
  MISC_FEATURE (16)..(16): Xaa at position 16 is Orn
  MISC_FEATURE (20)..(20): Xaa at position 20 is Aib
  MOD_RES (24)..(24): Lys at position 24 is chemically modified by conjugation of the epsilon-amino group of the Lys side chain with (2-[2-(2-amino-ethoxy)-ethoxy]-acetyl)3-(gamma-Glu)-CO-(CH2)12-CO 2H
  MISC_FEATURE (25)..(25): Xaa at position 25 is alpha-methyl-Tyr
  MOD_RES (28)..(28): Lys at position 28 is chemically modified by conjugation of the epsilon-amino group of the Lys side chain with (2-[2-(2-amino-ethoxy)-ethoxy]-acetyl)3-(gamma-Glu)-CO-(CH2)12-CO 2H
  MOD_RES (39)..(39): Ser at position 39 is amidated

SEQ ID NO: 354 - protein, 39 aa, Artificial Sequence; identical to SEQ ID NO: 314
  Synthetic Construct
  MISC_FEATURE (2)..(2): Xaa at position 2 is Aib
  MISC_FEATURE (6)..(6): Xaa at position 6 is alpha-methyl-Phe(2F)
  MISC_FEATURE (11)..(11): Xaa at position 11 is Aib
  MISC_FEATURE (13)..(13): Xaa at position 13 is alpha-methyl-Leu
  MISC_FEATURE (16)..(16): Xaa at position 16 is Orn
  MISC_FEATURE (20)..(20): Xaa at position 20 is Aib
  MOD_RES (24)..(24): Lys at position 24 is chemically modified by conjugation of the epsilon-amino group of the Lys side chain with (2-[2-(2-amino-ethoxy)-ethoxy]-acetyl)3-(gamma-Glu)-CO-(CH2)12-CO 2H
  MISC_FEATURE (25)..(25): Xaa at position 25 is alpha-methyl-Tyr
  MOD_RES (28)..(28): Lys at position 28 is chemically modified by conjugation of the epsilon-amino group of the Lys side chain with (2-[2-(2-amino-ethoxy)-ethoxy]-acetyl)3-(gamma-Glu)-CO-(CH2)12-CO 2H
  MOD_RES (39)..(39): Ser at position 39 is amidated

SEQ ID NO: 355 - protein, 39 aa, Artificial Sequence; identical to SEQ ID NO: 226
  Synthetic Construct
  MISC_FEATURE (2)..(2): Xaa at position 2 is Aib
  MISC_FEATURE (6)..(6): Xaa at position 6 is alpha-methyl-Phe(2F)
  MISC_FEATURE (10)..(10): Xaa at position 10 is 4Pal
  MISC_FEATURE (11)..(11): Xaa at position 11 is Aib
  MISC_FEATURE (13)..(13): Xaa at position 13 is alpha-methyl-Leu
  MISC_FEATURE (16)..(16): Xaa at position 16 is Orn
  MISC_FEATURE (20)..(20): Xaa at position 20 is Aib
  MOD_RES (24)..(24): Lys at position 24 is chemically modified by conjugation of the epsilon-amino group of the Lys side chain with (2-[2-(2-amino-ethoxy)-ethoxy]-acetyl)3-(gamma-Glu)-(10-(4-carbox yphenoxy)decanoyl)
  MISC_FEATURE (25)..(25): Xaa at position 25 is alpha-methyl-Tyr
  MOD_RES (28)..(28): Lys at position 28 is chemically modified by conjugation of the epsilon-amino group of the Lys side chain with (2-[2-(2-amino-ethoxy)-ethoxy]-acetyl)3-(gamma-Glu)-(10-(4-carbox yphenoxy)decanoyl)
  MOD_RES (39)..(39): Ser at position 39 is amidated

SEQ ID NO: 356 - protein, 39 aa, Artificial Sequence; identical to SEQ ID NO: 243
  Synthetic Construct
  MISC_FEATURE (2)..(2): Xaa at position 2 is Aib
  MISC_FEATURE (6)..(6): Xaa at position 6 is alpha-methyl-Phe(2F)
  MISC_FEATURE (11)..(11): Xaa at position 11 is Aib
  MISC_FEATURE (13)..(13): Xaa at position 13 is alpha-methyl-Leu
  MISC_FEATURE (16)..(16): Xaa at position 16 is Orn
  MISC_FEATURE (20)..(20): Xaa at position 20 is Aib
  MOD_RES (24)..(24): Lys at position 24 is chemically modified by conjugation of the epsilon-amino group of the Lys side chain with (2-[2-(2-amino-ethoxy)-ethoxy]-acetyl)3-(gamma-Glu)-(10-(4-carbox yphenoxy)decanoyl)
  MISC_FEATURE (25)..(25): Xaa at position 25 is alpha-methyl-Tyr
  MOD_RES (28)..(28): Lys at position 28 is chemically modified by conjugation of the epsilon-amino group of the Lys side chain with (2-[2-(2-amino-ethoxy)-ethoxy]-acetyl)3-(gamma-Glu)-(10-(4-carbox yphenoxy)decanoyl)
  MOD_RES (39)..(39): Ser at position 39 is amidated

SEQ ID NO: 357 - protein, 39 aa, Artificial Sequence; identical to SEQ ID NO: 314
  Synthetic Construct
  MISC_FEATURE (2)..(2): Xaa at position 2 is Aib
  MISC_FEATURE (6)..(6): Xaa at position 6 is alpha-methyl-Phe(2F)
  MISC_FEATURE (11)..(11): Xaa at position 11 is Aib
  MISC_FEATURE (13)..(13): Xaa at position 13 is alpha-methyl-Leu
  MISC_FEATURE (16)..(16): Xaa at position 16 is Orn
  MISC_FEATURE (20)..(20): Xaa at position 20 is Aib
  MOD_RES (24)..(24): Lys at position 24 is chemically modified by conjugation of the epsilon-amino group of the Lys side chain with (2-[2-(2-amino-ethoxy)-ethoxy]-acetyl)3-(gamma-Glu)-(10-(4-carbox yphenoxy)decanoyl)
  MISC_FEATURE (25)..(25): Xaa at position 25 is alpha-methyl-Tyr
  MOD_RES (28)..(28): Lys at position 28 is chemically modified by conjugation of the epsilon-amino group of the Lys side chain with (2-[2-(2-amino-ethoxy)-ethoxy]-acetyl)3-(gamma-Glu)-(10-(4-carbox yphenoxy)decanoyl)
  MOD_RES (39)..(39): Ser at position 39 is amidated

SEQ ID NO: 358 - protein, 39 aa, Artificial Sequence
  Synthetic Construct
  MISC_FEATURE (2)..(2): Xaa at position 2 is Aib
  MISC_FEATURE (6)..(6): Xaa at position 6 is alpha-methyl-Phe(2F)
  MISC_FEATURE (10)..(10): Xaa at position 10 is 4Pal
  MISC_FEATURE (11)..(11): Xaa at position 11 is Aib
  MISC_FEATURE (13)..(13): Xaa at position 13 is alpha-methyl-Leu
  MISC_FEATURE (16)..(16): Xaa at position 16 is Orn
  MOD_RES (17)..(17): Lys at position 17 is chemically modified by conjugation of the epsilon-amino group of the Lys side chain with (2-[2-(2-amino-ethoxy)-ethoxy]-acetyl)2-(gamma-Glu)-CO-(CH2)12-CO 2H
  MISC_FEATURE (20)..(20): Xaa at position 20 is Aib
  MISC_FEATURE (21)..(21): Xaa at position 21 is Orn
  MISC_FEATURE (24)..(24): Xaa at position 24 is D-Glu
  MISC_FEATURE (25)..(25): Xaa at position 25 is alpha-methyl-Tyr
  MOD_RES (28)..(28): Lys at position 28 is chemically modified by conjugation of the epsilon-amino group of the Lys side chain with (2-[2-(2-amino-ethoxy)-ethoxy]-acetyl)2-(gamma-Glu)-CO-(CH2)12-CO 2H
  MOD_RES (39)..(39): Ser at position 39 is amidated
YXEGTXTSDXXIXLDXKAQXXFIKXLIKGGPSSGAPPPS

SEQ ID NO: 359 - protein, 39 aa, Artificial Sequence
  Synthetic Construct
  MISC_FEATURE (2)..(2): Xaa at position 2 is Aib
  MISC_FEATURE (6)..(6): Xaa at position 6 is alpha-methyl-Phe(2F)
  MISC_FEATURE (11)..(11): Xaa at position 11 is Aib
  MISC_FEATURE (13)..(13): Xaa at position 13 is alpha-methyl-Leu
  MISC_FEATURE (16)..(16): Xaa at position 16 is Orn
  MOD_RES (17)..(17): Lys at position 17 is chemically modified by conjugation of the epsilon-amino group of the Lys side chain with (2-[2-(2-amino-ethoxy)-ethoxy]-acetyl)2-(gamma-Glu)-CO-(CH2)12-CO 2H
  MISC_FEATURE (20)..(20): Xaa at position 20 is Aib
  MISC_FEATURE (21)..(21): Xaa at position 21 is Orn
  MISC_FEATURE (24)..(24): Xaa at position 24 is D-Glu
  MISC_FEATURE (25)..(25): Xaa at position 25 is alpha-methyl-Tyr
  MOD_RES (28)..(28): Lys at position 28 is chemically modified by conjugation of the epsilon-amino group of the Lys side chain with (2-[2-(2-amino-ethoxy)-ethoxy]-acetyl)2-(gamma-Glu)-CO-(CH2)12-CO 2H
  MOD_RES (39)..(39): Ser at position 39 is amidated
YXEGTXTSDYXIXLDXKAQXXFIXXLIKGGPSSGAPPPS

SEQ ID NO: 360 - protein, 39 aa, Artificial Sequence
  Synthetic Construct
  MISC_FEATURE (2)..(2): Xaa at position 2 is Aib
  MISC_FEATURE (6)..(6): Xaa at position 6 is alpha-methyl-Phe(2F)
  MISC_FEATURE (11)..(11): Xaa at position 6 is alpha-methyl-Phe(2F)
  MISC_FEATURE (13)..(13): Xaa at position 13 is alpha-methyl-Leu
  MISC_FEATURE (16)..(16): Xaa at position 16 is Orn
  MOD_RES (17)..(17): Lys at position 17 is chemically modified by conjugation of the epsilon-amino group of the Lys side chain with (2-[2-(2-amino-ethoxy)-ethoxy]-acetyl)2-(gamma-Glu)-CO-(CH2)12-CO 2H
  MISC_FEATURE (20)..(20): Xaa at position 20 is Aib
  MISC_FEATURE (21)..(21): Xaa at position 21 is Orn
  MISC_FEATURE (24)..(24): Xaa at position 24 is D-Glu
  MISC_FEATURE (25)..(25): Xaa at position 25 is alpha-methyl-Tyr
  MOD_RES (28)..(28): Lys at position 28 is chemically modified by conjugation of the epsilon-amino group of the Lys side chain with (2-[2-(2-amino-ethoxy)-ethoxy]-acetyl)2-(gamma-Glu)-CO-(CH2)12-CO 2H
  MOD_RES (39)..(39): Ser at position 39 is amidated
YXEGTXTSDVXIXLDXKAQXXFIXXLIKGGPSSGAPPPS

SEQ ID NO: 361 - protein, 39 aa, Artificial Sequence
  Synthetic Construct
  MISC_FEATURE (2)..(2): Xaa at position 2 is Aib
  MISC_FEATURE (6)..(6): Xaa at position 6 is alpha-methyl-Phe(2F)
  MISC_FEATURE (10)..(10): Xaa at position 10 is 4Pal
  MISC_FEATURE (11)..(11): Xaa at position 11 is Aib
  MISC_FEATURE (13)..(13): Xaa at position 13 is alpha-methyl-Leu
  MISC_FEATURE (16)..(16): Xaa at position 16 is Orn
  MOD_RES (17)..(17): Lys at position 17 is chemically modified by conjugation of the epsilon-amino group of the Lys side chain with (2-[2-(2-amino-ethoxy)-ethoxy]-acetyl)2-(gamma-Glu)-(10-(4-carbox yphenoxy)decanoyl)
  MISC_FEATURE (20)..(20): Xaa at position 20 is Aib
  MISC_FEATURE (21)..(21): Xaa at position 21 is Orn
  MISC_FEATURE (24)..(24): Xaa at position 24 is D-Glu
  MISC_FEATURE (25)..(25): Xaa at position 25 is alpha-methyl-Tyr
  MOD_RES (28)..(28): Lys at position 28 is chemically modified by conjugation of the epsilon-amino group of the Lys side chain with (2-[2-(2-amino-ethoxy)-ethoxy]-acetyl)2-(gamma-Glu)-(10-(4-carbox yphenoxy)decanoyl)
  MOD_RES (39)..(39): Ser at position 39 is amidated
YXEGTXTSDXXIXLDXKAQXXFIXXLIKGGPSSGAPPPS

SEQ ID NO: 362 - protein, 39 aa, Artificial Sequence; identical to SEQ ID NO: 359
  Synthetic Construct
  MISC_FEATURE (2)..(2): Xaa at position 2 is Aib
  MISC_FEATURE (6)..(6): Xaa at position 6 is alpha-methyl-Phe(2F)
  MISC_FEATURE (11)..(11): Xaa at position 11 is Aib
  MISC_FEATURE (13)..(13): Xaa at position 13 is alpha-methyl-Leu
  MISC_FEATURE (16)..(16): Xaa at position 16 is Orn
  MOD_RES (17)..(17): Lys at position 17 is chemically modified by conjugation of the epsilon-amino group of the Lys side chain with (2-[2-(2-amino-ethoxy)-ethoxy]-acetyl)2-(gamma-Glu)-(10-(4-carbox yphenoxy)decanoyl)
  MISC_FEATURE (20)..(20): Xaa at position 20 is Aib
  MISC_FEATURE (21)..(21): Xaa at position 21 is Orn
  MISC_FEATURE (24)..(24): Xaa at position 24 is D-Glu
  MISC_FEATURE (25)..(25): Xaa at position 25 is alpha-methyl-Tyr
  MOD_RES (28)..(28): Lys at position 28 is chemically modified by conjugation of the epsilon-amino group of the Lys side chain with (2-[2-(2-amino-ethoxy)-ethoxy]-acetyl)2-(gamma-Glu)-(10-(4-carbox yphenoxy)decanoyl)
  MOD_RES (39)..(39): Ser at position 39 is amidated

SEQ ID NO: 363 - protein, 39 aa, Artificial Sequence; identical to SEQ ID NO: 360
  Synthetic Construct
  MISC_FEATURE (2)..(2): Xaa at position 2 is Aib
  MISC_FEATURE (6)..(6): Xaa at position 6 is alpha-methyl-Phe(2F)
  MISC_FEATURE (11)..(11): Xaa at position 11 is Aib
  MISC_FEATURE (13)..(13): Xaa at position 13 is alpha-methyl-Leu
  MISC_FEATURE (16)..(16): Xaa at position 16 is Orn
  MOD_RES (17)..(17): Lys at position 17 is chemically modified by conjugation of the epsilon-amino group of the Lys side chain with (2-[2-(2-amino-ethoxy)-ethoxy]-acetyl)2-(gamma-Glu)-(10-(4-carbox yphenoxy)decanoyl)
  MISC_FEATURE (20)..(20): Xaa at position 20 is Aib
  MISC_FEATURE (21)..(21): Xaa at position 21 is Orn
  MISC_FEATURE (24)..(24): Xaa at position 24 is D-Glu
  MISC_FEATURE (25)..(25): Xaa at position 25 is alpha-methyl-Tyr
  MOD_RES (28)..(28): Lys at position 28 is chemically modified by conjugation of the epsilon-amino group of the Lys side chain with (2-[2-(2-amino-ethoxy)-ethoxy]-acetyl)2-(gamma-Glu)-(10-(4-carbox yphenoxy)decanoyl)
  MOD_RES (39)..(39): Ser at position 39 is amidated

SEQ ID NO: 364 - protein, 39 aa, Artificial Sequence; identical to SEQ ID NO: 325
  Synthetic Construct
  MISC_FEATURE (2)..(2): Xaa at position 2 is Aib
  MISC_FEATURE (6)..(6): Xaa at position 6 is alpha-methyl-Phe(2F)
  MISC_FEATURE (10)..(10): Xaa at position 10 is 4Pal
  MISC_FEATURE (11)..(11): Xaa at position 11 is Aib
  MISC_FEATURE (13)..(13): Xaa at position 13 is alpha-methyl-Leu
  MISC_FEATURE (16)..(16): Xaa at position 16 is Orn
  MISC_FEATURE (20)..(20): Xaa at position 20 is Aib
  MISC_FEATURE (21)..(21): Xaa at position 21 is Orn
  MOD_RES (24)..(24): Lys at position 24 is chemically modified by conjugation of the epsilon-amino group of the Lys side chain with (2-[2-(2-amino-ethoxy)-ethoxy]-acetyl)2-(gamma-Glu)-(10-(4-carbox yphenoxy)decanoyl)
  MISC_FEATURE (25)..(25): Xaa at position 25 is alpha-methyl-Tyr
  MOD_RES (28)..(28): Lys at position 28 is chemically modified by conjugation of the epsilon-amino group of the Lys side chain with (2-[2-(2-amino-ethoxy)-ethoxy]-acetyl)2-(gamma-Glu)-(10-(4-carbox yphenoxy)decanoyl)
  MOD_RES (39)..(39): Ser at position 39 is amidated

SEQ ID NO: 365 - protein, 39 aa, Artificial Sequence; identical to SEQ ID NO: 326
  Synthetic Construct
  MISC_FEATURE (2)..(2): Xaa at position 2 is Aib
  MISC_FEATURE (6)..(6): Xaa at position 6 is alpha-methyl-Phe(2F)
  MISC_FEATURE (11)..(11): Xaa at position 11 is Aib
  MISC_FEATURE (13)..(13): Xaa at position 13 is alpha-methyl-Leu
  MISC_FEATURE (16)..(16): Xaa at position 16 is Orn
  MISC_FEATURE (20)..(20): Xaa at position 20 is Aib
  MISC_FEATURE (21)..(21): Xaa at position 21 is Orn
  MOD_RES (24)..(24): Lys at position 24 is chemically modified by conjugation of the epsilon-amino group of the Lys side chain with (2-[2-(2-amino-ethoxy)-ethoxy]-acetyl)2-(gamma-Glu)-(10-(4-carbox yphenoxy)decanoyl)
  MISC_FEATURE (25)..(25): Xaa at position 25 is alpha-methyl-Tyr
  MOD_RES (28)..(28): Lys at position 28 is chemically modified by conjugation of the epsilon-amino group of the Lys side chain with (2-[2-(2-amino-ethoxy)-ethoxy]-acetyl)2-(gamma-Glu)-(10-(4-carbox yphenoxy)decanoyl)
  MOD_RES (39)..(39): Ser at position 39 is amidated

SEQ ID NO: 366 - protein, 39 aa, Artificial Sequence; identical to SEQ ID NO: 327
  Synthetic Construct
  MISC_FEATURE (2)..(2): Xaa at position 2 is Aib
  MISC_FEATURE (6)..(6): Xaa at position 6 is alpha-methyl-Phe(2F)
  MISC_FEATURE (11)..(11): Xaa at position 11 is Aib
  MISC_FEATURE (13)..(13): Xaa at position 13 is alpha-methyl-Leu
  MISC_FEATURE (16)..(16): Xaa at position 16 is Orn
  MISC_FEATURE (20)..(20): Xaa at position 20 is Aib
  MISC_FEATURE (21)..(21): Xaa at position 21 is Orn
  MOD_RES (24)..(24): Lys at position 24 is chemically modified by conjugation of the epsilon-amino group of the Lys side chain with (2-[2-(2-amino-ethoxy)-ethoxy]-acetyl)2-(gamma-Glu)-(10-(4-carbox yphenoxy)decanoyl)
  MISC_FEATURE (25)..(25): Xaa at position 25 is alpha-methyl-Tyr
  MOD_RES (28)..(28): Lys at position 28 is chemically modified by conjugation of the epsilon-amino group of the Lys side chain with (2-[2-(2-amino-ethoxy)-ethoxy]-acetyl)2-(gamma-Glu)-(10-(4-carbox yphenoxy)decanoyl)
  MOD_RES (39)..(39): Ser at position 39 is amidated

SEQ ID NO: 367 - protein, 39 aa, Artificial Sequence; identical to SEQ ID NO: 253
  Synthetic Construct
  MISC_FEATURE (2)..(2): Xaa at position 2 is Aib
  MISC_FEATURE (6)..(6): Xaa at position 6 is alpha-methyl-Phe(2F)
  MISC_FEATURE (10)..(10): Xaa at position 10 is 4Pal
  MISC_FEATURE (11)..(11): Xaa at position 11 is Aib
  MISC_FEATURE (13)..(13): Xaa at position 13 is alpha-methyl-Leu
  MISC_FEATURE (16)..(16): Xaa at position 16 is Orn
  MOD_RES (17)..(17): Lys at position 17 is chemically modified by conjugation of the epsilon-amino group of the Lys side chain with (2-[2-(2-amino-ethoxy)-ethoxy]-acetyl)2-(gamma-Glu)-CO-(CH2)12-CO 2H
  MISC_FEATURE (20)..(20): Xaa at position 20 is Aib
  MOD_RES (21)..(21): Lys at position 21 is chemically modified by conjugation of the epsilon-amino group of the Lys side chain with (2-[2-(2-amino-ethoxy)-ethoxy]-acetyl)2-(gamma-Glu)-CO-(CH2)12-CO 2H
  MISC_FEATURE (24)..(24): Xaa at position 24 is D-Glu
  MISC_FEATURE (25)..(25): Xaa at position 25 is alpha-methyl-Tyr
  MOD_RES (39)..(39): Ser at position 39 is amidated

SEQ ID NO: 368 - protein, 39 aa, Artificial Sequence; identical to SEQ ID NO: 254
  Synthetic Construct
  MISC_FEATURE (2)..(2): Xaa at position 2 is Aib
  MISC_FEATURE (6)..(6): Xaa at position 6 is alpha-methyl-Phe(2F)
  MISC_FEATURE (10)..(10): Xaa at position 10 is 4Pal
  MISC_FEATURE (11)..(11): Xaa at position 11 is Aib
  MISC_FEATURE (13)..(13): Xaa at position 13 is alpha-methyl-Leu
  MISC_FEATURE (16)..(16): Xaa at position 16 is Orn
  MOD_RES (17)..(17): Lys at position 17 is chemically modified by conjugation of the epsilon-amino group of the Lys side chain with (2-[2-(2-amino-ethoxy)-ethoxy]-acetyl)2-(gamma-Glu)-CO-(CH2)12-CO 2H
  MISC_FEATURE (20)..(20): Xaa at position 20 is Aib
  MISC_FEATURE (24)..(24): Xaa at position 24 is D-Glu
  MISC_FEATURE (25)..(25): Xaa at position 25 is alpha-methyl-Tyr
  MOD_RES (28)..(28): Lys at position 28 is chemically modified by conjugation of the epsilon-amino group of the Lys side chain with (2-[2-(2-amino-ethoxy)-ethoxy]-acetyl)2-(gamma-Glu)-CO-(CH2)12-CO 2H
  MOD_RES (39)..(39): Ser at position 39 is amidated

SEQ ID NO: 369 - protein, 40 aa, Artificial Sequence; identical to SEQ ID NO: 255
  Synthetic Construct
  MISC_FEATURE (2)..(2): Xaa at position 2 is Aib
  MISC_FEATURE (6)..(6): Xaa at position 6 is alpha-methyl-Phe(2F)
  MISC_FEATURE (10)..(10): Xaa at position 10 is 4Pal
  MISC_FEATURE (11)..(11): Xaa at position 11 is Aib
  MISC_FEATURE (13)..(13): Xaa at position 13 is alpha-methyl-Leu
  MISC_FEATURE (16)..(16): Xaa at position 16 is Orn
  MOD_RES (17)..(17): Lys at position 17 is chemically modified by conjugation of the epsilon-amino group of the Lys side chain with (2-[2-(2-amino-ethoxy)-ethoxy]-acetyl)2-(gamma-Glu)-CO-(CH2)12-CO 2H
  MISC_FEATURE (20)..(20): Xaa at position 20 is Aib
  MISC_FEATURE (24)..(24): Xaa at position 24 is D-Glu
  MISC_FEATURE (25)..(25): Xaa at position 25 is alpha-methyl-Tyr
  MOD_RES (40)..(40): Lys at position 40 is chemically modified by conjugation of the epsilon-amino group of the Lys side chain with (2-[2-(2-amino-ethoxy)-ethoxy]-acetyl)2-(gamma-Glu)-CO-(CH2)12-CO 2H
  MOD_RES (40)..(40): Lys at position 40 is amidated

SEQ ID NO: 370 - protein, 39 aa, Artificial Sequence; identical to SEQ ID NO: 253
  Synthetic Construct
  MISC_FEATURE (2)..(2): Xaa at position 2 is Aib
  MISC_FEATURE (6)..(6): Xaa at position 6 is alpha-methyl-Phe(2F)
  MISC_FEATURE (10)..(10): Xaa at position 10 is 4Pal
  MISC_FEATURE (11)..(11): Xaa at position 11 is Aib
  MISC_FEATURE (13)..(13): Xaa at position 13 is alpha-methyl-Leu
  MISC_FEATURE (16)..(16): Xaa at position 16 is Orn
  MOD_RES (17)..(17): Lys at position 17 is chemically modified by conjugation of the epsilon-amino group of the Lys side chain with (2-[2-(2-amino-ethoxy)-ethoxy]-acetyl)2-(gamma-Glu)-(10-(4-carbox yphenoxy)decanoyl)
  MISC_FEATURE (20)..(20): Xaa at position 20 is Aib
  MOD_RES (21)..(21): Lys at position 21 is chemically modified by conjugation of the epsilon-amino group of the Lys side chain with (2-[2-(2-amino-ethoxy)-ethoxy]-acetyl)2-(gamma-Glu)-(10-(4-carbox yphenoxy)decanoyl)
  MISC_FEATURE (24)..(24): Xaa at position 24 is D-Glu
  MISC_FEATURE (25)..(25): Xaa at position 25 is alpha-methyl-Tyr
  MOD_RES (39)..(39): Ser at position 39 is amidated

SEQ ID NO: 371 - protein, 39 aa, Artificial Sequence; identical to SEQ ID NO: 254
  Synthetic Construct
  MISC_FEATURE (2)..(2): Xaa at position 2 is Aib
  MISC_FEATURE (6)..(6): Xaa at position 6 is alpha-methyl-Phe(2F)
  MISC_FEATURE (10)..(10): Xaa at position 10 is 4Pal
  MISC_FEATURE (11)..(11): Xaa at position 11 is Aib
  MISC_FEATURE (13)..(13): Xaa at position 13 is alpha-methyl-Leu
  MISC_FEATURE (16)..(16): Xaa at position 16 is Orn
  MOD_RES (17)..(17): Lys at position 17 is chemically modified by conjugation of the epsilon-amino group of the Lys side chain with (2-[2-(2-amino-ethoxy)-ethoxy]-acetyl)-(gamma-Glu)-(10-(4-carboxy phenoxy)decanoyl)
  MISC_FEATURE (20)..(20): Xaa at position 20 is Aib
  MISC_FEATURE (24)..(24): Xaa at position 24 is D-Glu
  MISC_FEATURE (25)..(25): Xaa at position 25 is alpha-methyl-Tyr
  MOD_RES (28)..(28): Lys at position 28 is chemically modified by conjugation of the epsilon-amino group of the Lys side chain with (2-[2-(2-amino-ethoxy)-ethoxy]-acetyl)-(gamma-Glu)-(10-(4-carboxy phenoxy)decanoyl)
  MOD_RES (39)..(39): Ser at position 39 is amidated

SEQ ID NO: 372 - protein, 40 aa, Artificial Sequence; identical to SEQ ID NO: 255
  Synthetic Construct
  MISC_FEATURE (2)..(2): Xaa at position 2 is Aib
  MISC_FEATURE (6)..(6): Xaa at position 6 is alpha-methyl-Phe(2F)
  MISC_FEATURE (10)..(10): Xaa at position 10 is 4Pal
  MISC_FEATURE (11)..(11): Xaa at position 11 is Aib
  MISC_FEATURE (13)..(13): Xaa at position 13 is alpha-methyl-Leu
  MISC_FEATURE (16)..(16): Xaa at position 16 is Orn
  MOD_RES (17)..(17): Lys at position 17 is chemically modified by conjugation of the epsilon-amino group of the Lys side chain with (2-[2-(2-amino-ethoxy)-ethoxy]-acetyl)-(gamma-Glu)-(10-(4-carboxy phenoxy)decanoyl)
  MISC_FEATURE (20)..(20): Xaa at position 20 is Aib
  MISC_FEATURE (24)..(24): Xaa at position 24 is D-Glu
  MISC_FEATURE (25)..(25): Xaa at position 25 is alpha-methyl-Tyr
  MOD_RES (40)..(40): Lys at position 40 is chemically modified by conjugation of the epsilon-amino group of the Lys side chain with (2-[2-(2-amino-ethoxy)-ethoxy]-acetyl)-(gamma-Glu)-(10-(4-carboxy phenoxy)decanoyl)
  MOD_RES (40)..(40): Lys at position 40 is amidated

SEQ ID NO: 373 - protein, 39 aa, Artificial Sequence; identical to SEQ ID NO: 243
  Synthetic Construct
  MISC_FEATURE (2)..(2): Xaa at position 2 is Aib
  MISC_FEATURE (6)..(6): Xaa at position 6 is alpha-methyl-Phe(2F)
  MISC_FEATURE (11)..(11): Xaa at position 11 is Aib
  MISC_FEATURE (13)..(13): Xaa at position 13 is alpha-methyl-Leu
  MISC_FEATURE (16)..(16): Xaa at position 16 is Orn
  MISC_FEATURE (20)..(20): Xaa at position 20 is Aib
  MOD_RES (24)..(24): Lys at position 24 is chemically modified by conjugation of the epsilon-amino group of the Lys side chain with (2-[2-(2-amino-ethoxy)-ethoxy]-acetyl)2-(gamma-Glu)-(2-[2-(2-amin o-ethoxy)-ethoxy]-acetyl)-CO-(CH2)12-CO2H
  MISC_FEATURE (25)..(25): Xaa at position 25 is alpha-methyl-Tyr
  MOD_RES (28)..(28): Lys at position 28 is chemically modified by conjugation of the epsilon-amino group of the Lys side chain with (2-[2-(2-amino-ethoxy)-ethoxy]-acetyl)2-(gamma-Glu)-(2-[2-(2-amin o-ethoxy)-ethoxy]-acetyl)-CO-(CH2)12-CO2H
  MOD_RES (39)..(39): Ser at position 39 is amidated

SEQ ID NO: 374 - protein, 39 aa, Artificial Sequence; identical to SEQ ID NO: 243
  Synthetic Construct
  MISC_FEATURE (2)..(2): Xaa at position 2 is Aib
  MISC_FEATURE (6)..(6): Xaa at position 6 is alpha-methyl-Phe(2F)
  MISC_FEATURE (11)..(11): Xaa at position 11 is Aib
  MISC_FEATURE (13)..(13): Xaa at position 13 is alpha-methyl-Leu
  MISC_FEATURE (16)..(16): Xaa at position 16 is Orn
  MISC_FEATURE (20)..(20): Xaa at position 20 is Aib
  MOD_RES (24)..(24): Lys at position 24 is chemically modified by conjugation of the epsilon-amino group of the Lys side chain with (2-[2-(2-amino-ethoxy)-ethoxy]-acetyl)-(gamma-Glu)-(2-[2-(2-amino -ethoxy)-ethoxy]-acetyl)2-CO-(CH2)12-CO2H
  MISC_FEATURE (25)..(25): Xaa at position 25 is alpha-methyl-Tyr
  MOD_RES (28)..(28): Lys at position 28 is chemically modified by conjugation of the epsilon-amino group of the Lys side chain with (2-[2-(2-amino-ethoxy)-ethoxy]-acetyl)-(gamma-Glu)-(2-[2-(2-amino -ethoxy)-ethoxy]-acetyl)2-CO-(CH2)12-CO2H
  MOD_RES (39)..(39): Ser at position 39 is amidated

SEQ ID NO: 375 - protein, 39 aa, Artificial Sequence; identical to SEQ ID NO: 243
  Synthetic Construct
  MISC_FEATURE (2)..(2): Xaa at position 2 is Aib
  MISC_FEATURE (6)..(6): Xaa at position 6 is alpha-methyl-Phe(2F)
  MISC_FEATURE (11)..(11): Xaa at position 11 is Aib
  MISC_FEATURE (13)..(13): Xaa at position 13 is alpha-methyl-Leu
  MISC_FEATURE (16)..(16): Xaa at position 16 is Orn
  MISC_FEATURE (20)..(20): Xaa at position 20 is Aib
  MOD_RES (24)..(24): Lys at position 24 is chemically modified by conjugation of the epsilon-amino group of the Lys side chain with (2-[2-(2-amino-ethoxy)-ethoxy]-acetyl)-(gamma-Glu)-(2-[2-(2-amino -ethoxy)-ethoxy]-acetyl)-CO-(CH2)12-CO2H
  MISC_FEATURE (25)..(25): Xaa at position 25 is alpha-methyl-Tyr
  MOD_RES (28)..(28): Lys at position 28 is chemically modified by conjugation of the epsilon-amino group of the Lys side chain with (2-[2-(2-amino-ethoxy)-ethoxy]-acetyl)-(gamma-Glu)-(2-[2-(2-amino -ethoxy)-ethoxy]-acetyl)-CO-(CH2)12-CO2H
  MOD_RES (39)..(39): Ser at position 39 is amidated

SEQ ID NO: 376 - protein, 39 aa, Artificial Sequence; identical to SEQ ID NO: 240
  Synthetic Construct
  MISC_FEATURE (2)..(2): Xaa at position 2 is Aib
  MISC_FEATURE (6)..(6): Xaa at position 6 is alpha-methyl-Phe(2F)
  MISC_FEATURE (11)..(11): Xaa at position 11 is Aib
  MISC_FEATURE (13)..(13): Xaa at position 13 is alpha-methyl-Leu
  MISC_FEATURE (16)..(16): Xaa at position 16 is Orn
  MOD_RES (17)..(17): Lys at position 17 is chemically modified by conjugation of the epsilon-amino group of the Lys side chain with (2-[2-(2-amino-ethoxy)-ethoxy]-acetyl)-(gamma-Glu)-CO-(CH2)12-CO2 H
  MISC_FEATURE (20)..(20): Xaa at position 20 is Aib
  MOD_RES (21)..(21): Lys at position 21 is chemically modified by conjugation of the epsilon-amino group of the Lys side chain with (2-[2-(2-amino-ethoxy)-ethoxy]-acetyl)-(gamma-Glu)-CO-(CH2)12-CO2 H
  MISC_FEATURE (24)..(24): Xaa at position 24 is D-Glu
  MISC_FEATURE (25)..(25): Xaa at position 25 is alpha-methyl-Tyr
  MOD_RES (39)..(39): Ser at position 39 is amidated

SEQ ID NO: 377 - protein, 39 aa, Artificial Sequence; identical to SEQ ID NO: 241
  Synthetic Construct
  MISC_FEATURE (2)..(2): Xaa at position 2 is Aib
  MISC_FEATURE (6)..(6): Xaa at position 6 is alpha-methyl-Phe(2F)
  MISC_FEATURE (11)..(11): Xaa at position 11 is Aib
  MISC_FEATURE (13)..(13): Xaa at position 13 is alpha-methyl-Leu
  MISC_FEATURE (16)..(16): Xaa at position 16 is Orn
  MOD_RES (17)..(17): Lys at position 17 is chemically modified by conjugation of the epsilon-amino group of the Lys side chain with (2-[2-(2-amino-ethoxy)-ethoxy]-acetyl)-(gamma-Glu)-CO-(CH2)12-CO2 H
  MISC_FEATURE (20)..(20): Xaa at position 20 is Aib
  MISC_FEATURE (24)..(24): Xaa at position 24 is D-Glu
  MISC_FEATURE (25)..(25): Xaa at position 25 is alpha-methyl-Tyr
  MOD_RES (28)..(28): Lys at position 28 is chemically modified by conjugation of the epsilon-amino group of the Lys side chain with (2-[2-(2-amino-ethoxy)-ethoxy]-acetyl)-(gamma-Glu)-CO-(CH2)12-CO2 H
  MOD_RES (39)..(39): Ser at position 39 is amidated

SEQ ID NO: 378 - protein, 40 aa, Artificial Sequence; identical to SEQ ID NO: 242
  Synthetic Construct
  MISC_FEATURE (2)..(2): Xaa at position 2 is Aib
  MISC_FEATURE (6)..(6): Xaa at position 6 is alpha-methyl-Phe(2F)
  MISC_FEATURE (11)..(11): Xaa at position 11 is Aib
  MISC_FEATURE (13)..(13): Xaa at position 13 is alpha-methyl-Leu
  MISC_FEATURE (16)..(16): Xaa at position 16 is Orn
  MOD_RES (17)..(17): Lys at position 17 is chemically modified by conjugation of the epsilon-amino group of the Lys side chain with (2-[2-(2-amino-ethoxy)-ethoxy]-acetyl)-(gamma-Glu)-CO-(CH2)12-CO2 H
  MISC_FEATURE (20)..(20): Xaa at position 20 is Aib
  MISC_FEATURE (24)..(24): Xaa at position 24 is D-Glu
  MISC_FEATURE (25)..(25): Xaa at position 25 is alpha-methyl-Tyr
  MOD_RES (40)..(40): Lys at position 40 is chemically modified by conjugation of the epsilon-amino group of the Lys side chain with (2-[2-(2-amino-ethoxy)-ethoxy]-acetyl)-(gamma-Glu)-CO-(CH2)12-CO2 H
  MOD_RES (40)..(40): Lys at position 40 is amidated

SEQ ID NO: 379 - protein, 39 aa, Artificial Sequence; identical to SEQ ID NO: 243
  Synthetic Construct
  MISC_FEATURE (2)..(2): Xaa at position 2 is Aib
  MISC_FEATURE (6)..(6): Xaa at position 6 is alpha-methyl-Phe(2F)
  MISC_FEATURE (11)..(11): Xaa at position 11 is Aib
  MISC_FEATURE (13)..(13): Xaa at position 13 is alpha-methyl-Leu
  MISC_FEATURE (16)..(16): Xaa at position 16 is Orn
  MISC_FEATURE (20)..(20): Xaa at position 20 is Aib
  MOD_RES (24)..(24): Lys at position 24 is chemically modified by conjugation of the epsilon-amino group of the Lys side chain with (2-[2-(2-amino-ethoxy)-ethoxy]-acetyl)-(gamma-Glu)-CO-(CH2)12-CO2 H
  MISC_FEATURE (25)..(25): Xaa at position 25 is alpha-methyl-Tyr
  MOD_RES (28)..(28): Lys at position 28 is chemically modified by conjugation of the epsilon-amino group of the Lys side chain with (2-[2-(2-amino-ethoxy)-ethoxy]-acetyl)-(gamma-Glu)-CO-(CH2)12-CO2 H
  MOD_RES (39)..(39): Ser at position 39 is amidated

SEQ ID NO: 380 - protein, 39 aa, Artificial Sequence; identical to SEQ ID NO: 244
  Synthetic Construct
  MISC_FEATURE (2)..(2): Xaa at position 2 is Aib
  MISC_FEATURE (6)..(6): Xaa at position 6 is alpha-methyl-Phe(2F)
  MISC_FEATURE (11)..(11): Xaa at position 11 is Aib
  MISC_FEATURE (13)..(13): Xaa at position 13 is alpha-methyl-Leu
  MISC_FEATURE (16)..(16): Xaa at position 16 is Orn
  MISC_FEATURE (20)..(20): Xaa at position 20 is Aib
  MOD_RES (21)..(21): Lys at position 21 is chemically modified by conjugation of the epsilon-amino group of the Lys side chain with (2-[2-(2-amino-ethoxy)-ethoxy]-acetyl)-(gamma-Glu)-CO-(CH2)12-CO2 H
  MISC_FEATURE (24)..(24): Xaa at position 24 is D-Glu
  MISC_FEATURE (25)..(25): Xaa at position 25 is alpha-methyl-Tyr
  MOD_RES (28)..(28): Lys at position 28 is chemically modified by conjugation of the epsilon-amino group of the Lys side chain with (2-[2-(2-amino-ethoxy)-ethoxy]-acetyl)-(gamma-Glu)-CO-(CH2)12-CO2 H
  MOD_RES (39)..(39): Ser at position 39 is amidated

SEQ ID NO: 381 - protein, 40 aa, Artificial Sequence; identical to SEQ ID NO: 245
  Synthetic Construct
  MISC_FEATURE (2)..(2): Xaa at position 2 is Aib
  MISC_FEATURE (6)..(6): Xaa at position 6 is alpha-methyl-Phe(2F)
  MISC_FEATURE (11)..(11): Xaa at position 11 is Aib
  MISC_FEATURE (13)..(13): Xaa at position 13 is alpha-methyl-Leu
  MISC_FEATURE (16)..(16): Xaa at position 16 is Orn
  MISC_FEATURE (20)..(20): Xaa at position 20 is Aib
  MOD_RES (21)..(21): Lys at position 21 is chemically modified by conjugation of the epsilon-amino group of the Lys side chain with (2-[2-(2-amino-ethoxy)-ethoxy]-acetyl)-(gamma-Glu)-CO-(CH2)12-CO2 H
  MISC_FEATURE (24)..(24): Xaa at position 24 is D-Glu
  MISC_FEATURE (25)..(25): Xaa at position 25 is alpha-methyl-Tyr
  MOD_RES (40)..(40): Lys at position 40 is chemically modified by conjugation of the epsilon-amino group of the Lys side chain with (2-[2-(2-amino-ethoxy)-ethoxy]-acetyl)-(gamma-Glu)-CO-(CH2)12-CO2 H
  MOD_RES (40)..(40): Lys at position 40 is amidated

SEQ ID NO: 382 - protein, 39 aa, Artificial Sequence; identical to SEQ ID NO: 240
  Synthetic Construct
  MISC_FEATURE (2)..(2): Xaa at position 2 is Aib
  MISC_FEATURE (6)..(6): Xaa at position 6 is alpha-methyl-Phe(2F)
  MISC_FEATURE (11)..(11): Xaa at position 11 is Aib
  MISC_FEATURE (13)..(13): Xaa at position 13 is alpha-methyl-Leu
  MISC_FEATURE (16)..(16): Xaa at position 16 is Orn
  MOD_RES (17)..(17): Lys at position 17 is chemically modified by conjugation of the epsilon-amino group of the Lys side chain with (2-[2-(2-amino-ethoxy)-ethoxy]-acetyl)-(gamma-Glu)-(10-(4-carboxy phenoxy)decanoyl)
  MISC_FEATURE (20)..(20): Xaa at position 20 is Aib
  MOD_RES (21)..(21): Lys at position 21 is chemically modified by conjugation of the epsilon-amino group of the Lys side chain with (2-[2-(2-amino-ethoxy)-ethoxy]-acetyl)-(gamma-Glu)-(10-(4-carboxy phenoxy)decanoyl)
  MISC_FEATURE (24)..(24): Xaa at position 24 is D-Glu
  MISC_FEATURE (25)..(25): Xaa at position 25 is alpha-methyl-Tyr
  MOD_RES (39)..(39): Ser at position 39 is amidated

SEQ ID NO: 383 - protein, 39 aa, Artificial Sequence; identical to SEQ ID NO: 241
  Synthetic Construct
  MISC_FEATURE (2)..(2): Xaa at position 2 is Aib
  MISC_FEATURE (6)..(6): Xaa at position 6 is alpha-methyl-Phe(2F)
  MISC_FEATURE (11)..(11): Xaa at position 11 is Aib
  MISC_FEATURE (13)..(13): Xaa at position 13 is alpha-methyl-Leu
  MISC_FEATURE (16)..(16): Xaa at position 16 is Orn
  MOD_RES (17)..(17): Lys at position 17 is chemically modified by conjugation of the epsilon-amino group of the Lys side chain with (2-[2-(2-amino-ethoxy)-ethoxy]-acetyl)-(gamma-Glu)-(10-(4-carboxy phenoxy)decanoyl)
  MISC_FEATURE (20)..(20): Xaa at position 20 is Aib
  MISC_FEATURE (24)..(24): Xaa at position 24 is D-Glu
  MISC_FEATURE (25)..(25): Xaa at position 25 is alpha-methyl-Tyr
  MOD_RES (28)..(28): Lys at position 28 is chemically modified by conjugation of the epsilon-amino group of the Lys side chain with (2-[2-(2-amino-ethoxy)-ethoxy]-acetyl)-(gamma-Glu)-(10-(4-carboxy phenoxy)decanoyl)
  MOD_RES (39)..(39): Ser at position 39 is amidated

SEQ ID NO: 384 - protein, 40 aa, Artificial Sequence; identical to SEQ ID NO: 242
  Synthetic Construct
  MISC_FEATURE (2)..(2): Xaa at position 2 is Aib
  MISC_FEATURE (6)..(6): Xaa at position 6 is alpha-methyl-Phe(2F)
  MISC_FEATURE (11)..(11): Xaa at position 11 is Aib
  MISC_FEATURE (13)..(13): Xaa at position 13 is alpha-methyl-Leu
  MISC_FEATURE (16)..(16): Xaa at position 16 is Orn
  MOD_RES (17)..(17): Lys at position 17 is chemically modified by conjugation of the epsilon-amino group of the Lys side chain with (2-[2-(2-amino-ethoxy)-ethoxy]-acetyl)-(gamma-Glu)-(10-(4-carboxy phenoxy)decanoyl)
  MISC_FEATURE (20)..(20): Xaa at position 20 is Aib
  MISC_FEATURE (24)..(24): Xaa at position 24 is D-Glu
  MISC_FEATURE (25)..(25): Xaa at position 25 is alpha-methyl-Tyr
  MOD_RES (40)..(40): Lys at position 40 is chemically modified by conjugation of the epsilon-amino group of the Lys side chain with (2-[2-(2-amino-ethoxy)-ethoxy]-acetyl)-(gamma-Glu)-(10-(4-carboxy phenoxy)decanoyl)
  MOD_RES (40)..(40): Lys at position 40 is amidated

SEQ ID NO: 385 - protein, 39 aa, Artificial Sequence; identical to SEQ ID NO: 243
  Synthetic Construct
  MISC_FEATURE (2)..(2): Xaa at position 2 is Aib
  MISC_FEATURE (6)..(6): Xaa at position 6 is alpha-methyl-Phe(2F)
  MISC_FEATURE (11)..(11): Xaa at position 11 is Aib
  MISC_FEATURE (13)..(13): Xaa at position 13 is alpha-methyl-Leu
  MISC_FEATURE (16)..(16): Xaa at position 16 is Orn
  MISC_FEATURE (20)..(20): Xaa at position 20 is Aib
  MOD_RES (24)..(24): Lys at position 24 is chemically modified by conjugation of the epsilon-amino group of the Lys side chain with (2-[2-(2-amino-ethoxy)-ethoxy]-acetyl)-(gamma-Glu)-(10-(4-carboxy phenoxy)decanoyl)
  MISC_FEATURE (25)..(25): Xaa at position 25 is alpha-methyl-Tyr
  MOD_RES (28)..(28): Lys at position 28 is chemically modified by conjugation of the epsilon-amino group of the Lys side chain with (2-[2-(2-amino-ethoxy)-ethoxy]-acetyl)-(gamma-Glu)-(10-(4-carboxy phenoxy)decanoyl)
  MOD_RES (39)..(39): Ser at position 39 is amidated

SEQ ID NO: 386 - protein, 39 aa, Artificial Sequence; identical to SEQ ID NO: 244
  Synthetic Construct
  MISC_FEATURE (2)..(2): Xaa at position 2 is Aib
  MISC_FEATURE (6)..(6): Xaa at position 6 is alpha-methyl-Phe(2F)
  MISC_FEATURE (11)..(11): Xaa at position 11 is Aib
  MISC_FEATURE (13)..(13): Xaa at position 13 is alpha-methyl-Leu
  MISC_FEATURE (16)..(16): Xaa at position 16 is Orn
  MISC_FEATURE (20)..(20): Xaa at position 20 is Aib
  MOD_RES (21)..(21): Lys at position 21 is chemically modified by conjugation of the epsilon-amino group of the Lys side chain with (2-[2-(2-amino-ethoxy)-ethoxy]-acetyl)-(gamma-Glu)-(10-(4-carboxy phenoxy)decanoyl)
  MISC_FEATURE (24)..(24): Xaa at position 24 is D-Glu
  MISC_FEATURE (25)..(25): Xaa at position 25 is alpha-methyl-Tyr
  MOD_RES (28)..(28): Lys at position 28 is chemically modified by conjugation of the epsilon-amino group of the Lys side chain with (2-[2-(2-amino-ethoxy)-ethoxy]-acetyl)-(gamma-Glu)-(10-(4-carboxy phenoxy)decanoyl)
  MOD_RES (39)..(39): Ser at position 39 is amidated

SEQ ID NO: 387 - protein, 40 aa, Artificial Sequence; identical to SEQ ID NO: 245
  Synthetic Construct
  MISC_FEATURE (2)..(2): Xaa at position 2 is Aib
  MISC_FEATURE (6)..(6): Xaa at position 6 is alpha-methyl-Phe(2F)
  MISC_FEATURE (11)..(11): Xaa at position 11 is Aib
  MISC_FEATURE (13)..(13): Xaa at position 13 is alpha-methyl-Leu
  MISC_FEATURE (16)..(16): Xaa at position 16 is Orn
  MISC_FEATURE (20)..(20): Xaa at position 20 is Aib
  MOD_RES (21)..(21): Lys at position 21 is chemically modified by conjugation of the epsilon-amino group of the Lys side chain with (2-[2-(2-amino-ethoxy)-ethoxy]-acetyl)-(gamma-Glu)-(10-(4-carboxy phenoxy)decanoyl)
  MISC_FEATURE (24)..(24): Xaa at position 24 is D-Glu
  MISC_FEATURE (25)..(25): Xaa at position 25 is alpha-methyl-Tyr
  MOD_RES (40)..(40): Lys at position 40 is chemically modified by conjugation of the epsilon-amino group of the Lys side chain with (2-[2-(2-amino-ethoxy)-ethoxy]-acetyl)-(gamma-Glu)-(10-(4-carboxy phenoxy)decanoyl)
  MOD_RES (40)..(40): Lys at position 40 is amidated

SEQ ID NO: 388 - protein, 39 aa, Artificial Sequence; identical to SEQ ID NO: 328
  Synthetic Construct
  MISC_FEATURE (2)..(2): Xaa at position 2 is Aib
  MISC_FEATURE (6)..(6): Xaa at position 6 is alpha-methyl-Phe(2F)
  MISC_FEATURE (11)..(11): Xaa at position 11 is Aib
  MISC_FEATURE (13)..(13): Xaa at position 13 is alpha-methyl-Leu
  MISC_FEATURE (16)..(16): Xaa at position 16 is Orn
  MOD_RES (17)..(17): Lys at position 17 is chemically modified by conjugation of the epsilon-amino group of the Lys side chain with (2-[2-(2-amino-ethoxy)-ethoxy]-acetyl)-(gamma-Glu)-(10-(4-carboxy phenoxy)decanoyl)
  MISC_FEATURE (20)..(20): Xaa at position 20 is Aib
  MOD_RES (21)..(21): Lys at position 21 is chemically modified by conjugation of the epsilon-amino group of the Lys side chain with (2-[2-(2-amino-ethoxy)-ethoxy]-acetyl)-(gamma-Glu)-(10-(4-carboxy phenoxy)decanoyl)
  MISC_FEATURE (24)..(24): Xaa at position 24 is D-Glu
  MISC_FEATURE (25)..(25): Xaa at position 25 is alpha-methyl-Tyr
  MOD_RES (39)..(39): Ser at position 39 is amidated

SEQ ID NO: 389 - protein, 39 aa, Artificial Sequence; identical to SEQ ID NO: 335
  Synthetic Construct
  MISC_FEATURE (2)..(2): Xaa at position 2 is Aib
  MISC_FEATURE (6)..(6): Xaa at position 6 is alpha-methyl-Phe(2F)
  MISC_FEATURE (11)..(11): Xaa at position 11 is Aib
  MISC_FEATURE (13)..(13): Xaa at position 13 is alpha-methyl-Leu
  MISC_FEATURE (16)..(16): Xaa at position 16 is Orn
  MOD_RES (17)..(17): Lys at position 17 is chemically modified by conjugation of the epsilon-amino group of the Lys side chain with (2-[2-(2-amino-ethoxy)-ethoxy]-acetyl)-(gamma-Glu)-(10-(4-carboxy phenoxy)decanoyl)
  MISC_FEATURE (20)..(20): Xaa at position 20 is Aib
  MISC_FEATURE (24)..(24): Xaa at position 24 is D-Glu
  MISC_FEATURE (25)..(25): Xaa at position 25 is alpha-methyl-Tyr
  MOD_RES (28)..(28): Lys at position 28 is chemically modified by conjugation of the epsilon-amino group of the Lys side chain with (2-[2-(2-amino-ethoxy)-ethoxy]-acetyl)-(gamma-Glu)-(10-(4-carboxy phenoxy)decanoyl)
  MOD_RES (39)..(39): Ser at position 39 is amidated

SEQ ID NO: 390 - protein, 40 aa, Artificial Sequence
  Synthetic Construct
  MISC_FEATURE (2)..(2): Xaa at position 2 is Aib
  MISC_FEATURE (6)..(6): Xaa at position 6 is alpha-methyl-Phe(2F)
  MISC_FEATURE (11)..(11): Xaa at position 11 is Aib
  MISC_FEATURE (13)..(13): Xaa at position 13 is alpha-methyl-Leu
  MISC_FEATURE (16)..(16): Xaa at position 16 is Orn
  MOD_RES (17)..(17): Lys at position 17 is chemically modified by conjugation of the epsilon-amino group of the Lys side chain with (2-[2-(2-amino-ethoxy)-ethoxy]-acetyl)2-(gamma-Glu)-(10-(4-carbox yphenoxy)decanoyl)
  MISC_FEATURE (20)..(20): Xaa at position 20 is Aib
  MISC_FEATURE (24)..(24): Xaa at position 24 is D-Glu
  MISC_FEATURE (25)..(25): Xaa at position 25 is alpha-methyl-Tyr
  MOD_RES (40)..(40): Lys at position 40 is chemically modified by conjugation of the epsilon-amino group of the Lys side chain with (2-[2-(2-amino-ethoxy)-ethoxy]-acetyl)2-(gamma-Glu)-(10-(4-carbox yphenoxy)decanoyl)
  MOD_RES (40)..(40): Lys at position 40 is amidated
YXEGTXTSDVXIXLDXKAQXEFIXXLIEGGPSSGAPPPSK

SEQ ID NO: 391 - protein, 39 aa, Artificial Sequence; identical to SEQ ID NO: 314
  Synthetic Construct
  MISC_FEATURE (2)..(2): Xaa at position 2 is Aib
  MISC_FEATURE (6)..(6): Xaa at position 6 is alpha-methyl-Phe(2F)
  MISC_FEATURE (11)..(11): Xaa at position 11 is Aib
  MISC_FEATURE (13)..(13): Xaa at position 13 is alpha-methyl-Leu
  MISC_FEATURE (16)..(16): Xaa at position 16 is Orn
  MISC_FEATURE (20)..(20): Xaa at position 20 is Aib
  MOD_RES (24)..(24): Lys at position 24 is chemically modified by conjugation of the epsilon-amino group of the Lys side chain with (2-[2-(2-amino-ethoxy)-ethoxy]-acetyl)-(gamma-Glu)-(10-(4-carboxy phenoxy)decanoyl)
  MISC_FEATURE (25)..(25): Xaa at position 25 is alpha-methyl-Tyr
  MOD_RES (28)..(28): Lys at position 28 is chemically modified by conjugation of the epsilon-amino group of the Lys side chain with (2-[2-(2-amino-ethoxy)-ethoxy]-acetyl)-(gamma-Glu)-(10-(4-carboxy phenoxy)decanoyl)
  MOD_RES (39)..(39): Ser at position 39 is amidated

SEQ ID NO: 392 - protein, 39 aa, Artificial Sequence; identical to SEQ ID NO: 339
  Synthetic Construct
  MISC_FEATURE (2)..(2): Xaa at position 2 is Aib
  MISC_FEATURE (6)..(6): Xaa at position 6 is alpha-methyl-Phe(2F)
  MISC_FEATURE (11)..(11): Xaa at position 11 is Aib
  MISC_FEATURE (13)..(13): Xaa at position 13 is alpha-methyl-Leu
  MISC_FEATURE (16)..(16): Xaa at position 16 is Orn
  MISC_FEATURE (20)..(20): Xaa at position 20 is Aib
  MOD_RES (21)..(21): Lys at position 21 is chemically modified by conjugation of the epsilon-amino group of the Lys side chain with (2-[2-(2-amino-ethoxy)-ethoxy]-acetyl)-(gamma-Glu)-(10-(4-carboxy phenoxy)decanoyl)
  MISC_FEATURE (24)..(24): Xaa at position 24 is D-Glu
  MISC_FEATURE (25)..(25): Xaa at position 25 is alpha-methyl-Tyr
  MOD_RES (28)..(28): Lys at position 28 is chemically modified by conjugation of the epsilon-amino group of the Lys side chain with (2-[2-(2-amino-ethoxy)-ethoxy]-acetyl)-(gamma-Glu)-(10-(4-carboxy phenoxy)decanoyl)
  MOD_RES (39)..(39): Ser at position 39 is amidated

SEQ ID NO: 393 - protein, 40 aa, Artificial Sequence
  Synthetic Construct
  MISC_FEATURE (2)..(2): Xaa at position 2 is Aib
  MISC_FEATURE (6)..(6): Xaa at position 6 is alpha-methyl-Phe(2F)
  MISC_FEATURE (11)..(11): Xaa at position 11 is Aib
  MISC_FEATURE (13)..(13): Xaa at position 13 is alpha-methyl-Leu
  MISC_FEATURE (16)..(16): Xaa at position 16 is Orn
  MISC_FEATURE (20)..(20): Xaa at position 20 is Aib
  MOD_RES (21)..(21): Lys at position 21 is chemically modified by conjugation of the epsilon-amino group of the Lys side chain with (2-[2-(2-amino-ethoxy)-ethoxy]-acetyl)2-(gamma-Glu)-(10-(4-carbox yphenoxy)decanoyl)
  MISC_FEATURE (24)..(24): Xaa at position 24 is D-Glu
  MISC_FEATURE (25)..(25): Xaa at position 25 is alpha-methyl-Tyr
  MOD_RES (40)..(40): Lys at position 40 is chemically modified by conjugation of the epsilon-amino group of the Lys side chain with (2-[2-(2-amino-ethoxy)-ethoxy]-acetyl)2-(gamma-Glu)-(10-(4-carbox yphenoxy)decanoyl)
  MOD_RES (40)..(40): Lys at position 40 is amidated
YXEGTXTSDVXIXLDXIAQXKFIXXLIEGGPSSGAPPPSK

SEQ ID NO: 394 - protein, 39 aa, Artificial Sequence; identical to SEQ ID NO: 253
  Synthetic Construct
  MISC_FEATURE (2)..(2): Xaa at position 2 is Aib
  MISC_FEATURE (6)..(6): Xaa at position 6 is alpha-methyl-Phe(2F)
  MISC_FEATURE (10)..(10): Xaa at position 10 is 4Pal
  MISC_FEATURE (11)..(11): Xaa at position 11 is Aib
  MISC_FEATURE (13)..(13): Xaa at position 13 is alpha-methyl-Leu
  MISC_FEATURE (16)..(16): Xaa at position 16 is Orn
  MOD_RES (17)..(17): Lys at position 17 is chemically modified by conjugation of the epsilon-amino group of the Lys side chain with (2-[2-(2-amino-ethoxy)-ethoxy]-acetyl)2-CO-(CH2)12-CO2H
  MISC_FEATURE (20)..(20): Xaa at position 20 is Aib
  MOD_RES (21)..(21): Lys at position 21 is chemically modified by conjugation of the epsilon-amino group of the Lys side chain with (2-[2-(2-amino-ethoxy)-ethoxy]-acetyl)2-CO-(CH2)12-CO2H
  MISC_FEATURE (24)..(24): Xaa at position 24 is D-Glu
  MISC_FEATURE (25)..(25): Xaa at position 25 is alpha-methyl-Tyr
  MOD_RES (39)..(39): Ser at position 39 is amidated

SEQ ID NO: 395 - protein, 39 aa, Artificial Sequence; identical to SEQ ID NO: 240
  Synthetic Construct
  MISC_FEATURE (2)..(2): Xaa at position 2 is Aib
  MISC_FEATURE (6)..(6): Xaa at position 6 is alpha-methyl-Phe(2F)
  MISC_FEATURE (11)..(11): Xaa at position 11 is Aib
  MISC_FEATURE (13)..(13): Xaa at position 13 is alpha-methyl-Leu
  MISC_FEATURE (16)..(16): Xaa at position 16 is Orn
  MOD_RES (17)..(17): Lys at position 17 is chemically modified by conjugation of the epsilon-amino group of the Lys side chain with (2-[2-(2-amino-ethoxy)-ethoxy]-acetyl)2-CO-(CH2)12-CO2H
  MISC_FEATURE (20)..(20): Xaa at position 20 is Aib
  MOD_RES (21)..(21): Lys at position 21 is chemically modified by conjugation of the epsilon-amino group of the Lys side chain with (2-[2-(2-amino-ethoxy)-ethoxy]-acetyl)2-CO-(CH2)12-CO2H
  MISC_FEATURE (24)..(24): Xaa at position 24 is D-Glu
  MISC_FEATURE (25)..(25): Xaa at position 25 is alpha-methyl-Tyr
  MOD_RES (39)..(39): Ser at position 39 is amidated

SEQ ID NO: 396 - protein, 39 aa, Artificial Sequence; identical to SEQ ID NO: 328
  Synthetic Construct
  MISC_FEATURE (2)..(2): Xaa at position 2 is Aib
  MISC_FEATURE (6)..(6): Xaa at position 6 is alpha-methyl-Phe(2F)
  MISC_FEATURE (11)..(11): Xaa at position 11 is Aib
  MISC_FEATURE (13)..(13): Xaa at position 13 is alpha-methyl-Leu
  MISC_FEATURE (16)..(16): Xaa at position 16 is Orn
  MOD_RES (17)..(17): Lys at position 17 is chemically modified by conjugation of the epsilon-amino group of the Lys side chain with (2-[2-(2-amino-ethoxy)-ethoxy]-acetyl)2-CO-(CH2)12-CO2H
  MISC_FEATURE (20)..(20): Xaa at position 20 is Aib
  MOD_RES (21)..(21): Lys at position 21 is chemically modified by conjugation of the epsilon-amino group of the Lys side chain with (2-[2-(2-amino-ethoxy)-ethoxy]-acetyl)2-CO-(CH2)12-CO2H
  MISC_FEATURE (24)..(24): Xaa at position 24 is D-Glu
  MISC_FEATURE (25)..(25): Xaa at position 25 is alpha-methyl-Tyr
  MOD_RES (39)..(39): Ser at position 39 is amidated

SEQ ID NO: 397 - protein, 39 aa, Artificial Sequence; identical to SEQ ID NO: 254
  Synthetic Construct
  MISC_FEATURE (2)..(2): Xaa at position 2 is Aib
  MISC_FEATURE (6)..(6): Xaa at position 6 is alpha-methyl-Phe(2F)
  MISC_FEATURE (10)..(10): Xaa at position 10 is 4Pal
  MISC_FEATURE (11)..(11): Xaa at position 11 is Aib
  MISC_FEATURE (13)..(13): Xaa at position 13 is alpha-methyl-Leu
  MISC_FEATURE (16)..(16): Xaa at position 16 is Orn
  MOD_RES (17)..(17): Lys at position 17 is chemically modified by conjugation of the epsilon-amino group of the Lys side chain with (2-[2-(2-amino-ethoxy)-ethoxy]-acetyl)2-CO-(CH2)12-CO2H
  MISC_FEATURE (20)..(20): Xaa at position 20 is Aib
  MISC_FEATURE (24)..(24): Xaa at position 24 is D-Glu
  MISC_FEATURE (25)..(25): Xaa at position 25 is alpha-methyl-Tyr
  MOD_RES (28)..(28): Lys at position 28 is chemically modified by conjugation of the epsilon-amino group of the Lys side chain with (2-[2-(2-amino-ethoxy)-ethoxy]-acetyl)2-CO-(CH2)12-CO2H
  MOD_RES (39)..(39): Ser at position 39 is amidated

SEQ ID NO: 398 - protein, 39 aa, Artificial Sequence; identical to SEQ ID NO: 241
  Synthetic Construct
  MISC_FEATURE (2)..(2): Xaa at position 2 is Aib
  MISC_FEATURE (6)..(6): Xaa at position 6 is alpha-methyl-Phe(2F)
  MISC_FEATURE (11)..(11): Xaa at position 11 is Aib
  MISC_FEATURE (13)..(13): Xaa at position 13 is alpha-methyl-Leu
  MISC_FEATURE (16)..(16): Xaa at position 16 is Orn
  MOD_RES (17)..(17): Lys at position 17 is chemically modified by conjugation of the epsilon-amino group of the Lys side chain with (2-[2-(2-amino-ethoxy)-ethoxy]-acetyl)2-CO-(CH2)12-CO2H
  MISC_FEATURE (20)..(20): Xaa at position 20 is Aib
  MISC_FEATURE (24)..(24): Xaa at position 24 is D-Glu
  MISC_FEATURE (25)..(25): Xaa at position 25 is alpha-methyl-Tyr
  MOD_RES (28)..(28): Lys at position 28 is chemically modified by conjugation of the epsilon-amino group of the Lys side chain with (2-[2-(2-amino-ethoxy)-ethoxy]-acetyl)2-CO-(CH2)12-CO2H
  MOD_RES (39)..(39): Ser at position 39 is amidated

SEQ ID NO: 399 - protein, 39 aa, Artificial Sequence; identical to SEQ ID NO: 335
  Synthetic Construct
  MISC_FEATURE (2)..(2): Xaa at position 2 is Aib
  MISC_FEATURE (6)..(6): Xaa at position 6 is alpha-methyl-Phe(2F)
  MISC_FEATURE (11)..(11): Xaa at position 11 is Aib
  MISC_FEATURE (13)..(13): Xaa at position 13 is alpha-methyl-Leu
  MISC_FEATURE (16)..(16): Xaa at position 16 is Orn
  MOD_RES (17)..(17): Lys at position 17 is chemically modified by conjugation of the epsilon-amino group of the Lys side chain with (2-[2-(2-amino-ethoxy)-ethoxy]-acetyl)2-CO-(CH2)12-CO2H
  MISC_FEATURE (20)..(20): Xaa at position 20 is Aib
  MISC_FEATURE (24)..(24): Xaa at position 24 is D-Glu
  MISC_FEATURE (25)..(25): Xaa at position 25 is alpha-methyl-Tyr
  MOD_RES (28)..(28): Lys at position 28 is chemically modified by conjugation of the epsilon-amino group of the Lys side chain with (2-[2-(2-amino-ethoxy)-ethoxy]-acetyl)2-CO-(CH2)12-CO2H
  MOD_RES (39)..(39): Ser at position 39 is amidated

SEQ ID NO: 400 - protein, 39 aa, Artificial Sequence
  Synthetic Construct
  MISC_FEATURE (2)..(2): Xaa at position 2 is Aib
  MISC_FEATURE (6)..(6): Xaa at position 6 is alpha-methyl-Phe(2F)
  MISC_FEATURE (11)..(11): Xaa at position 11 is Aib
  MISC_FEATURE (13)..(13): Xaa at position 13 is alpha-methyl-Leu
  MISC_FEATURE (16)..(16): Xaa at position 16 is Orn
  MISC_FEATURE (20)..(20): Xaa at position 20 is Aib
  MOD_RES (24)..(24): Lys at position 24 is chemically modified by conjugation of the epsilon-amino group of the Lys side chain with (2-[2-(2-amino-ethoxy)-ethoxy]-acetyl)2-CO-(CH2)12-CO2H
  MISC_FEATURE (25)..(25): Xaa at position 25 is alpha-methyl-Tyr
  MOD_RES (28)..(28): Lys at position 28 is chemically modified by conjugation of the epsilon-amino group of the Lys side chain with (2-[2-(2-amino-ethoxy)-ethoxy]-acetyl)2-CO-(CH2)12-CO2H
  MOD_RES (39)..(39): Ser at position 39 is amidated
YXEGTXTSDVXIXLDXQAQXEFIKXLIKGGPSSGAPPPS

SEQ ID NO: 401 - protein, 39 aa, Artificial Sequence
  Synthetic Construct
  MISC_FEATURE (2)..(2): Xaa at position 2 is Aib
  MISC_FEATURE (6)..(6): Xaa at position 6 is alpha-methyl-Phe(2F)
  MISC_FEATURE (10)..(10): Xaa at position 10 is 4Pal
  MISC_FEATURE (11)..(11): Xaa at position 11 is Aib
  MISC_FEATURE (13)..(13): Xaa at position 13 is alpha-methyl-Leu
  MISC_FEATURE (16)..(16): Xaa at position 16 is Orn
  MISC_FEATURE (20)..(20): Xaa at position 20 is Aib
  MISC_FEATURE (21)..(21): Xaa at position 21 is Orn
  MOD_RES (24)..(24): Lys at position 24 is chemically modified by conjugation of the epsilon-amino group of the Lys side chain with (2-[2-(2-amino-ethoxy)-ethoxy]-acetyl)2-(gamma-Glu)-CO-(CH2)12-CO 2H
  MISC_FEATURE (25)..(25): Xaa at position 25 is alpha-methyl-Tyr
  MOD_RES (28)..(28): Lys at position 28 is chemically modified by conjugation of the epsilon-amino group of the Lys side chain with (2-[2-(2-amino-ethoxy)-ethoxy]-acetyl)2-(gamma-Glu)-CO-(CH2)12-CO 2H
  MOD_RES (39)..(39): Ser at position 39 is amidated
YXEGTXTSDXXIXLDXQAQXXFIKXLIKGGPSSGAPPPS

SEQ ID NO: 402 - protein, 39 aa, Artificial Sequence
  Synthetic Construct
  MISC_FEATURE (2)..(2): Xaa at position 2 is Aib
  MISC_FEATURE (6)..(6): Xaa at position 6 is alpha-methyl-Phe(2F)
  MISC_FEATURE (10)..(10): Xaa at position 10 is 4Pal
  MISC_FEATURE (11)..(11): Xaa at position 11 is Aib
  MISC_FEATURE (13)..(13): Xaa at position 13 is alpha-methyl-Leu
  MISC_FEATURE (16)..(16): Xaa at position 16 is Orn
  MOD_RES (17)..(17): Lys at position 17 is chemically modified by conjugation of the epsilon-amino group of the Lys side chain with (2-[2-(2-amino-ethoxy)-ethoxy]-acetyl)2-(10-(4-carboxyphenoxy)dec anoyl)
  MISC_FEATURE (20)..(20): Xaa at position 20 is Aib
  MOD_RES (24)..(24): Lys at position 24 is chemically modified by conjugation of the epsilon-amino group of the Lys side chain with (2-[2-(2-amino-ethoxy)-ethoxy]-acetyl)2-(10-(4-carboxyphenoxy)dec anoyl)
  MISC_FEATURE (25)..(25): Xaa at position 25 is alpha-methyl-Tyr
  MOD_RES (39)..(39): Ser at position 39 is amidated
YXEGTXTSDXXIXLDXKAQXKFIKXLIEGGPSSGAPPPS

SEQ ID NO: 403 - protein, 39 aa, Artificial Sequence; identical to SEQ ID NO: 240
  Synthetic Construct
  MISC_FEATURE (2)..(2): Xaa at position 2 is Aib
  MISC_FEATURE (6)..(6): Xaa at position 6 is alpha-methyl-Phe(2F)
  MISC_FEATURE (11)..(11): Xaa at position 11 is Aib
  MISC_FEATURE (13)..(13): Xaa at position 13 is alpha-methyl-Leu
  MISC_FEATURE (16)..(16): Xaa at position 16 is Orn
  MOD_RES (17)..(17): Lys at position 17 is chemically modified by conjugation of the epsilon-amino group of the Lys side chain with (2-[2-(2-amino-ethoxy)-ethoxy]-acetyl)2-(10-(4-carboxyphenoxy)dec anoyl)
  MISC_FEATURE (20)..(20): Xaa at position 20 is Aib
  MOD_RES (21)..(21): Lys at position 21 is chemically modified by conjugation of the epsilon-amino group of the Lys side chain with (2-[2-(2-amino-ethoxy)-ethoxy]-acetyl)2-(10-(4-carboxyphenoxy)dec anoyl)
  MISC_FEATURE (24)..(24): Xaa at position 24 is D-Glu
  MISC_FEATURE (25)..(25): Xaa at position 25 is alpha-methyl-Tyr
  MOD_RES (39)..(39): Ser at position 39 is amidated

SEQ ID NO: 404 - protein, 39 aa, Artificial Sequence; identical to SEQ ID NO: 328
  Synthetic Construct
  MISC_FEATURE (2)..(2): Xaa at position 2 is Aib
  MISC_FEATURE (6)..(6): Xaa at position 6 is alpha-methyl-Phe(2F)
  MISC_FEATURE (11)..(11): Xaa at position 11 is Aib
  MISC_FEATURE (13)..(13): Xaa at position 13 is alpha-methyl-Leu
  MISC_FEATURE (16)..(16): Xaa at position 16 is Orn
  MOD_RES (17)..(17): Lys at position 17 is chemically modified by conjugation of the epsilon-amino group of the Lys side chain with (2-[2-(2-amino-ethoxy)-ethoxy]-acetyl)2-(10-(4-carboxyphenoxy)dec anoyl)
  MISC_FEATURE (20)..(20): Xaa at position 20 is Aib
  MOD_RES (21)..(21): Lys at position 21 is chemically modified by conjugation of the epsilon-amino group of the Lys side chain with (2-[2-(2-amino-ethoxy)-ethoxy]-acetyl)2-(10-(4-carboxyphenoxy)dec anoyl)
  MISC_FEATURE (24)..(24): Xaa at position 24 is D-Glu
  MISC_FEATURE (25)..(25): Xaa at position 25 is alpha-methyl-Tyr
  MOD_RES (39)..(39): Ser at position 39 is amidated

SEQ ID NO: 405 - protein, 39 aa, Artificial Sequence; identical to SEQ ID NO: 254
  Synthetic Construct
  MISC_FEATURE (2)..(2): Xaa at position 2 is Aib
  MISC_FEATURE (6)..(6): Xaa at position 6 is alpha-methyl-Phe(2F)
  MISC_FEATURE (10)..(10): Xaa at position 10 is 4Pal
  MISC_FEATURE (11)..(11): Xaa at position 11 is Aib
  MISC_FEATURE (13)..(13): Xaa at position 13 is alpha-methyl-Leu
  MISC_FEATURE (16)..(16): Xaa at position 16 is Orn
  MOD_RES (17)..(17): Lys at position 17 is chemically modified by conjugation of the epsilon-amino group of the Lys side chain with (2-[2-(2-amino-ethoxy)-ethoxy]-acetyl)2-(10-(4-carboxyphenoxy)dec anoyl)
  MISC_FEATURE (20)..(20): Xaa at position 20 is Aib
  MISC_FEATURE (24)..(24): Xaa at position 24 is D-Glu
  MISC_FEATURE (25)..(25): Xaa at position 25 is alpha-methyl-Tyr
  MOD_RES (28)..(28): Lys at position 28 is chemically modified by conjugation of the epsilon-amino group of the Lys side chain with (2-[2-(2-amino-ethoxy)-ethoxy]-acetyl)2-(10-(4-carboxyphenoxy)dec anoyl)
  MOD_RES (39)..(39): Ser at position 39 is amidated

SEQ ID NO: 406 - protein, 39 aa, Artificial Sequence; identical to SEQ ID NO: 241
  Synthetic Construct
  MISC_FEATURE (2)..(2): Xaa at position 2 is Aib
  MISC_FEATURE (6)..(6): Xaa at position 6 is alpha-methyl-Phe(2F)
  MISC_FEATURE (11)..(11): Xaa at position 11 is Aib
  MISC_FEATURE (13)..(13): Xaa at position 13 is alpha-methyl-Leu
  MISC_FEATURE (16)..(16): Xaa at position 16 is Orn
  MOD_RES (17)..(17): Lys at position 17 is chemically modified by conjugation of the epsilon-amino group of the Lys side chain with (2-[2-(2-amino-ethoxy)-ethoxy]-acetyl)2-(10-(4-carboxyphenoxy)dec anoyl)
  MISC_FEATURE (20)..(20): Xaa at position 20 is Aib
  MISC_FEATURE (24)..(24): Xaa at position 24 is D-Glu
  MISC_FEATURE (25)..(25): Xaa at position 25 is alpha-methyl-Tyr
  MOD_RES (28)..(28): Lys at position 28 is chemically modified by conjugation of the epsilon-amino group of the Lys side chain with (2-[2-(2-amino-ethoxy)-ethoxy]-acetyl)2-(10-(4-carboxyphenoxy)dec anoyl)
  MOD_RES (39)..(39): Ser at position 39 is amidated

SEQ ID NO: 407 - protein, 39 aa, Artificial Sequence; identical to SEQ ID NO: 335
  Synthetic Construct
  MISC_FEATURE (2)..(2): Xaa at position 2 is Aib
  MISC_FEATURE (6)..(6): Xaa at position 6 is alpha-methyl-Phe(2F)
  MISC_FEATURE (11)..(11): Xaa at position 11 is Aib
  MISC_FEATURE (13)..(13): Xaa at position 13 is alpha-methyl-Leu
  MISC_FEATURE (16)..(16): Xaa at position 16 is Orn
  MOD_RES (17)..(17): Lys at position 17 is chemically modified by conjugation of the epsilon-amino group of the Lys side chain with (2-[2-(2-amino-ethoxy)-ethoxy]-acetyl)2-(10-(4-carboxyphenoxy)dec anoyl)
  MISC_FEATURE (20)..(20): Xaa at position 20 is Aib
  MISC_FEATURE (24)..(24): Xaa at position 24 is D-Glu
  MISC_FEATURE (25)..(25): Xaa at position 25 is alpha-methyl-Tyr
  MOD_RES (28)..(28): Lys at position 28 is chemically modified by conjugation of the epsilon-amino group of the Lys side chain with (2-[2-(2-amino-ethoxy)-ethoxy]-acetyl)2-(10-(4-carboxyphenoxy)dec anoyl)
  MOD_RES (39)..(39): Ser at position 39 is amidated

SEQ ID NO: 408 - protein, 39 aa, Artificial Sequence; identical to SEQ ID NO: 328
  Synthetic Construct
  MISC_FEATURE (2)..(2): Xaa at position 2 is Aib
  MISC_FEATURE (6)..(6): Xaa at position 6 is alpha-methyl-Phe(2F)
  MISC_FEATURE (11)..(11): Xaa at position 11 is Aib
  MISC_FEATURE (13)..(13): Xaa at position 13 is alpha-methyl-Leu
  MISC_FEATURE (16)..(16): Xaa at position 16 is Orn
  MOD_RES (17)..(17): Lys at position 17 is chemically modified by conjugation of the epsilon-amino group of the Lys side chain with (2-[2-(2-amino-ethoxy)-ethoxy]-acetyl)-(gamma-Glu)-CO-(CH2)12-CO2 H
  MISC_FEATURE (20)..(20): Xaa at position 20 is Aib
  MOD_RES (21)..(21): Lys at position 21 is chemically modified by conjugation of the epsilon-amino group of the Lys side chain with (2-[2-(2-amino-ethoxy)-ethoxy]-acetyl)-(gamma-Glu)-CO-(CH2)12-CO2 H
  MISC_FEATURE (24)..(24): Xaa at position 24 is D-Glu
  MISC_FEATURE (25)..(25): Xaa at position 25 is alpha-methyl-Tyr
  MOD_RES (39)..(39): Ser at position 39 is amidated

SEQ ID NO: 409 - protein, 39 aa, Artificial Sequence; identical to SEQ ID NO: 335
  Synthetic Construct
  MISC_FEATURE (2)..(2): Xaa at position 2 is Aib
  MISC_FEATURE (6)..(6): Xaa at position 6 is alpha-methyl-Phe(2F)
  MISC_FEATURE (11)..(11): Xaa at position 11 is Aib
  MISC_FEATURE (13)..(13): Xaa at position 13 is alpha-methyl-Leu
  MISC_FEATURE (16)..(16): Xaa at position 16 is Orn
  MOD_RES (17)..(17): Lys at position 17 is chemically modified by conjugation of the epsilon-amino group of the Lys side chain with (2-[2-(2-amino-ethoxy)-ethoxy]-acetyl)-(gamma-Glu)-CO-(CH2)12-CO2 H
  MISC_FEATURE (20)..(20): Xaa at position 20 is Aib
  MISC_FEATURE (24)..(24): Xaa at position 24 is D-Glu
  MISC_FEATURE (25)..(25): Xaa at position 25 is alpha-methyl-Tyr
  MOD_RES (28)..(28): Lys at position 28 is chemically modified by conjugation of the epsilon-amino group of the Lys side chain with (2-[2-(2-amino-ethoxy)-ethoxy]-acetyl)-(gamma-Glu)-CO-(CH2)12-CO2 H
  MOD_RES (39)..(39): Ser at position 39 is amidated

SEQ ID NO: 410 - protein, 39 aa, Artificial Sequence; identical to SEQ ID NO: 314
  Synthetic Construct
  MISC_FEATURE (2)..(2): Xaa at position 2 is Aib
  MISC_FEATURE (6)..(6): Xaa at position 6 is alpha-methyl-Phe(2F)
  MISC_FEATURE (11)..(11): Xaa at position 11 is Aib
  MISC_FEATURE (13)..(13): Xaa at position 13 is alpha-methyl-Leu
  MISC_FEATURE (16)..(16): Xaa at position 16 is Orn
  MISC_FEATURE (20)..(20): Xaa at position 20 is Aib
  MOD_RES (24)..(24): Lys at position 24 is chemically modified by conjugation of the epsilon-amino group of the Lys side chain with (2-[2-(2-amino-ethoxy)-ethoxy]-acetyl)-(gamma-Glu)-CO-(CH2)12-CO2 H
  MISC_FEATURE (25)..(25): Xaa at position 25 is alpha-methyl-Tyr
  MOD_RES (28)..(28): Lys at position 28 is chemically modified by conjugation of the epsilon-amino group of the Lys side chain with (2-[2-(2-amino-ethoxy)-ethoxy]-acetyl)-(gamma-Glu)-CO-(CH2)12-CO2 H
  MOD_RES (39)..(39): Ser at position 39 is amidated

SEQ ID NO: 411 - protein, 39 aa, Artificial Sequence
  Synthetic Construct
  MISC_FEATURE (2)..(2): Xaa at position 2 is Aib
  MISC_FEATURE (6)..(6): Xaa at position 6 is alpha-methyl-Phe(2F)
  MISC_FEATURE (11)..(11): Xaa at position 11 is Aib
  MISC_FEATURE (13)..(13): Xaa at position 13 is alpha-methyl-Leu
  MISC_FEATURE (16)..(16): Xaa at position 16 is Orn
  MISC_FEATURE (20)..(20): Xaa at position 20 is Aib
  MISC_FEATURE (21)..(21): Xaa at position 21 is Orn
  MOD_RES (24)..(24): Lys at position 24 is chemically modified by conjugation of the epsilon-amino group of the Lys side chain with (2-[2-(2-amino-ethoxy)-ethoxy]-acetyl)2-(gamma-Glu)-CO-(CH2)12-CO 2H
  MISC_FEATURE (25)..(25): Xaa at position 25 is alpha-methyl-Tyr
  MOD_RES (28)..(28): Lys at position 28 is chemically modified by conjugation of the epsilon-amino group of the Lys side chain with (2-[2-(2-amino-ethoxy)-ethoxy]-acetyl)2-(gamma-Glu)-CO-(CH2)12-CO 2H
  MOD_RES (39)..(39): Ser at position 39 is amidated
YXEGTXTSDYXIXLDXQAQXXFIKXLIKGGPSSGAPPPS

SEQ ID NO: 412 - protein, 39 aa, Artificial Sequence
  Synthetic Construct
  MISC_FEATURE (2)..(2): Xaa at position 2 is Aib
  MISC_FEATURE (6)..(6): Xaa at position 6 is alpha-methyl-Phe(2F)
  MISC_FEATURE (11)..(11): Xaa at position 11 is Aib
  MISC_FEATURE (13)..(13): Xaa at position 13 is alpha-methyl-Leu
  MISC_FEATURE (16)..(16): Xaa at position 16 is Orn
  MISC_FEATURE (20)..(20): Xaa at position 20 is Aib
  MOD_RES (24)..(24): Lys at position 24 is chemically modified by conjugation of the epsilon-amino group of the Lys side chain with (2-[2-(2-amino-ethoxy)-ethoxy]-acetyl)2-(gamma-Glu)-(10-(4-carbox yphenoxy)decanoyl)
  MISC_FEATURE (25)..(25): Xaa at position 25 is alpha-methyl-Tyr
  MOD_RES (28)..(28): Lys at position 28 is chemically modified by conjugation of the epsilon-amino group of the Lys side chain with (2-[2-(2-amino-ethoxy)-ethoxy]-acetyl)2-(gamma-Glu)-(10-(4-carbox yphenoxy)decanoyl)
  MOD_RES (39)..(39): Ser at position 39 is amidated
YXEGTXTSDYXIXLDXQAQXEFIKXLIKGGPSSGAPPPS

SEQ ID NO: 413 - protein, 39 aa, Artificial Sequence
  Synthetic Construct
  MISC_FEATURE (2)..(2): Xaa at position 2 is Aib
  MISC_FEATURE (6)..(6): Xaa at position 6 is alpha-methyl-Phe(2F)
  MISC_FEATURE (10)..(10): Xaa at position 10 is 4Pal
  MISC_FEATURE (11)..(11): Xaa at position 11 is Aib
  MISC_FEATURE (13)..(13): Xaa at position 13 is alpha-methyl-Leu
  MISC_FEATURE (16)..(16): Xaa at position 16 is Orn
  MISC_FEATURE (20)..(20): Xaa at position 20 is Aib
  MOD_RES (24)..(24): Lys at position 24 is chemically modified by conjugation of the epsilon-amino group of the Lys side chain with (2-[2-(2-amino-ethoxy)-ethoxy]-acetyl)2-(gamma-Glu)-(10-(4-carbox yphenoxy)decanoyl)
  MISC_FEATURE (25)..(25): Xaa at position 25 is alpha-methyl-Tyr
  MOD_RES (28)..(28): Lys at position 28 is chemically modified by conjugation of the epsilon-amino group of the Lys side chain with (2-[2-(2-amino-ethoxy)-ethoxy]-acetyl)2-(gamma-Glu)-(10-(4-carbox yphenoxy)decanoyl)
  MOD_RES (39)..(39): Ser at position 39 is amidated
YXEGTXTSDXXIXLDXQAQXEFIKXLIKGGPSSGAPPPS

SEQ ID NO: 414 - protein, 39 aa, Artificial Sequence; identical to SEQ ID NO: 253
  Synthetic Construct
  MISC_FEATURE (2)..(2): Xaa at position 2 is Aib
  MISC_FEATURE (6)..(6): Xaa at position 6 is alpha-methyl-Phe(2F)
  MISC_FEATURE (10)..(10): Xaa at position 10 is 4Pal
  MISC_FEATURE (11)..(11): Xaa at position 11 is Aib
  MISC_FEATURE (13)..(13): Xaa at position 13 is alpha-methyl-Leu
  MISC_FEATURE (16)..(16): Xaa at position 16 is Orn
  MOD_RES (17)..(17): Lys at position 17 is chemically modified by conjugation of the epsilon-amino group of the Lys side chain with PEG3-(gamma-Glu)-CO-(CH2)12-CO2H
  MISC_FEATURE (20)..(20): Xaa at position 20 is Aib
  MOD_RES (21)..(21): Lys at position 21 is chemically modified by conjugation of the epsilon-amino group of the Lys side chain with PEG3-(gamma-Glu)-CO-(CH2)12-CO2H
  MISC_FEATURE (24)..(24): Xaa at position 24 is D-Glu
  MISC_FEATURE (25)..(25): Xaa at position 25 is alpha-methyl-Tyr
  MOD_RES (39)..(39): Ser at position 39 is amidated

SEQ ID NO: 415 - protein, 39 aa, Artificial Sequence; identical to SEQ ID NO: 253
  Synthetic Construct
  MISC_FEATURE (2)..(2): Xaa at position 2 is Aib
  MISC_FEATURE (6)..(6): Xaa at position 6 is alpha-methyl-Phe(2F)
  MISC_FEATURE (10)..(10): Xaa at position 10 is 4Pal
  MISC_FEATURE (11)..(11): Xaa at position 11 is Aib
  MISC_FEATURE (13)..(13): Xaa at position 13 is alpha-methyl-Leu
  MISC_FEATURE (16)..(16): Xaa at position 16 is Orn
  MOD_RES (17)..(17): Lys at position 17 is chemically modified by conjugation of the epsilon-amino group of the Lys side chain with PEG4-(gamma-Glu)-CO-(CH2)12-CO2H
  MISC_FEATURE (20)..(20): Xaa at position 20 is Aib
  MOD_RES (21)..(21): Lys at position 21 is chemically modified by conjugation of the epsilon-amino group of the Lys side chain with PEG4-(gamma-Glu)-CO-(CH2)12-CO2H
  MISC_FEATURE (24)..(24): Xaa at position 24 is D-Glu
  MISC_FEATURE (25)..(25): Xaa at position 25 is alpha-methyl-Tyr
  MOD_RES (39)..(39): Ser at position 39 is amidated

SEQ ID NO: 416 - protein, 39 aa, Artificial Sequence
  Synthetic Construct
  MISC_FEATURE (2)..(2): Xaa at position 2 is Aib
  MISC_FEATURE (6)..(6): Xaa at position 6 is alpha-methyl-Phe(2F)
  MISC_FEATURE (10)..(10): Xaa at position 10 is 4Pal
  MISC_FEATURE (11)..(11): Xaa at position 11 is Aib
  MISC_FEATURE (13)..(13): Xaa at position 13 is alpha-methyl-Leu
  MISC_FEATURE (16)..(16): Xaa at position 16 is Orn
  MOD_RES (17)..(17): Lys at position 17 is chemically modified by conjugation of the epsilon-amino group of the Lys side chain with (2-[2-(2-amino-ethoxy)-ethoxy]-acetyl)2-(gamma-Glu)-CO-(CH2)12-CO 2H
  MISC_FEATURE (20)..(20): Xaa at position 20 is Aib
  MOD_RES (21)..(21): Lys at position 21 is chemically modified by conjugation of the epsilon-amino group of the Lys side chain with (2-[2-(2-amino-ethoxy)-ethoxy]-acetyl)2-(gamma-Glu)-CO-(CH2)12-CO 2H
  MISC_FEATURE (24)..(24): Xaa at position 24 is D-Glu
  MISC_FEATURE (25)..(25): Xaa at position 25 is alpha-methyl-Tyr
  MISC_FEATURE (28)..(28): Xaa at position 28 is Orn
  MOD_RES (39)..(39): Ser at position 39 is amidated
YXEGTXTSDXXIXLDXKAQXKFIXXLIXGGPSSGAPPPS

SEQ ID NO: 417 - protein, 39 aa, Artificial Sequence
  Synthetic Construct
  MISC_FEATURE (2)..(2): Xaa at position 2 is Aib
  MISC_FEATURE (6)..(6): Xaa at position 6 is alpha-methyl-Phe(2F)
  MISC_FEATURE (11)..(11): Xaa at position 11 is Aib
  MISC_FEATURE (13)..(13): Xaa at position 13 is alpha-methyl-Leu
  MISC_FEATURE (16)..(16): Xaa at position 16 is Orn
  MOD_RES (17)..(17): Lys at position 17 is chemically modified by conjugation of the epsilon-amino group of the Lys side chain with (2-[2-(2-amino-ethoxy)-ethoxy]-acetyl)2-(gamma-Glu)-CO-(CH2)12-CO 2H
  MISC_FEATURE (20)..(20): Xaa at position 20 is Aib
  MOD_RES (21)..(21): Lys at position 21 is chemically modified by conjugation of the epsilon-amino group of the Lys side chain with (2-[2-(2-amino-ethoxy)-ethoxy]-acetyl)2-(gamma-Glu)-CO-(CH2)12-CO 2H
  MISC_FEATURE (24)..(24): Xaa at position 24 is D-Glu
  MISC_FEATURE (25)..(25): Xaa at position 25 is alpha-methyl-Tyr
  MISC_FEATURE (28)..(28): Xaa at position 28 is Orn
  MOD_RES (39)..(39): Ser at position 39 is amidated
YXEGTXTSDVXIXLDXKAQXKFIXXLIXGGPSSGAPPPS

SEQ ID NO: 418 - protein, 39 aa, Artificial Sequence; identical to SEQ ID NO: 416
  Synthetic Construct
  MISC_FEATURE (2)..(2): Xaa at position 2 is Aib
  MISC_FEATURE (6)..(6): Xaa at position 6 is alpha-methyl-Phe(2F)
  MISC_FEATURE (10)..(10): Xaa at position 10 is 4Pal
  MISC_FEATURE (11)..(11): Xaa at position 11 is Aib
  MISC_FEATURE (13)..(13): Xaa at position 13 is alpha-methyl-Leu
  MISC_FEATURE (16)..(16): Xaa at position 16 is Orn
  MOD_RES (17)..(17): Lys at position 17 is chemically modified by conjugation of the epsilon-amino group of the Lys side chain with (2-[2-(2-amino-ethoxy)-ethoxy]-acetyl)2-(gamma-Glu)-(10-(4-carbox yphenoxy)decanoyl)
  MISC_FEATURE (20)..(20): Xaa at position 20 is Aib
  MOD_RES (21)..(21): Lys at position 21 is chemically modified by conjugation of the epsilon-amino group of the Lys side chain with (2-[2-(2-amino-ethoxy)-ethoxy]-acetyl)2-(gamma-Glu)-(10-(4-carbox yphenoxy)decanoyl)
  MISC_FEATURE (24)..(24): Xaa at position 24 is D-Glu
  MISC_FEATURE (25)..(25): Xaa at position 25 is alpha-methyl-Tyr
  MISC_FEATURE (28)..(28): Xaa at position 28 is Orn
  MOD_RES (39)..(39): Ser at position 39 is amidated

SEQ ID NO: 419 - protein, 39 aa, Artificial Sequence
  Synthetic Construct
  MISC_FEATURE (2)..(2): Xaa at position 2 is Aib
  MISC_FEATURE (6)..(6): Xaa at position 6 is alpha-methyl-Phe(2F)
  MISC_FEATURE (11)..(11): Xaa at position 11 is Aib
  MISC_FEATURE (13)..(13): Xaa at position 13 is alpha-methyl-Leu
  MISC_FEATURE (16)..(16): Xaa at position 16 is Orn
  MOD_RES (17)..(17): Lys at position 17 is chemically modified by conjugation of the epsilon-amino group of the Lys side chain with (2-[2-(2-amino-ethoxy)-ethoxy]-acetyl)2-(gamma-Glu)-(10-(4-carbox yphenoxy)decanoyl)
  MISC_FEATURE (20)..(20): Xaa at position 20 is Aib
  MOD_RES (21)..(21): Lys at position 21 is chemically modified by conjugation of the epsilon-amino group of the Lys side chain with (2-[2-(2-amino-ethoxy)-ethoxy]-acetyl)2-(gamma-Glu)-(10-(4-carbox yphenoxy)decanoyl)
  MISC_FEATURE (24)..(24): Xaa at position 24 is D-Glu
  MISC_FEATURE (25)..(25): Xaa at position 25 is alpha-methyl-Tyr
  MISC_FEATURE (28)..(28): Xaa at position 28 is Orn
  MOD_RES (39)..(39): Ser at position 39 is amidated
YXEGTXTSDYXIXLDXKAQXKFIXXLIXGGPSSGAPPPS

SEQ ID NO: 420 - protein, 39 aa, Artificial Sequence; identical to SEQ ID NO: 417
  Synthetic Construct
  MISC_FEATURE (2)..(2): Xaa at position 2 is Aib
  MISC_FEATURE (6)..(6): Xaa at position 6 is alpha-methyl-Phe(2F)
  MISC_FEATURE (11)..(11): Xaa at position 11 is Aib
  MISC_FEATURE (13)..(13): Xaa at position 13 is alpha-methyl-Leu
  MISC_FEATURE (16)..(16): Xaa at position 16 is Orn
  MOD_RES (17)..(17): Lys at position 17 is chemically modified by conjugation of the epsilon-amino group of the Lys side chain with (2-[2-(2-amino-ethoxy)-ethoxy]-acetyl)2-(gamma-Glu)-(10-(4-carbox yphenoxy)decanoyl)
  MISC_FEATURE (20)..(20): Xaa at position 20 is Aib
  MOD_RES (21)..(21): Lys at position 21 is chemically modified by conjugation of the epsilon-amino group of the Lys side chain with (2-[2-(2-amino-ethoxy)-ethoxy]-acetyl)2-(gamma-Glu)-(10-(4-carbox yphenoxy)decanoyl)
  MISC_FEATURE (24)..(24): Xaa at position 24 is D-Glu
  MISC_FEATURE (25)..(25): Xaa at position 25 is alpha-methyl-Tyr
  MISC_FEATURE (28)..(28): Xaa at position 28 is Orn
  MOD_RES (39)..(39): Ser at position 39 is amidated

SEQ ID NO: 421 - protein, 39 aa, Artificial Sequence; identical to SEQ ID NO: 413
  Synthetic Construct
  MISC_FEATURE (2)..(2): Xaa at position 2 is Aib
  MISC_FEATURE (6)..(6): Xaa at position 6 is alpha-methyl-Phe(2F)
  MISC_FEATURE (10)..(10): Xaa at position 10 is 4Pal
  MISC_FEATURE (11)..(11): Xaa at position 11 is Aib
  MISC_FEATURE (13)..(13): Xaa at position 13 is alpha-methyl-Leu
  MISC_FEATURE (16)..(16): Xaa at position 16 is Orn
  MISC_FEATURE (20)..(20): Xaa at position 20 is Aib
  MOD_RES (24)..(24): Lys at position 24 is chemically modified by conjugation of the epsilon-amino group of the Lys side chain with (2-[2-(2-amino-ethoxy)-ethoxy]-acetyl)2-(gamma-Glu)-CO-(CH2)12-CO 2H
  MISC_FEATURE (25)..(25): Xaa at position 25 is alpha-methyl-Tyr
  MOD_RES (28)..(28): Lys at position 28 is chemically modified by conjugation of the epsilon-amino group of the Lys side chain with (2-[2-(2-amino-ethoxy)-ethoxy]-acetyl)2-(gamma-Glu)-CO-(CH2)12-CO 2H
  MOD_RES (39)..(39): Ser at position 39 is amidated

SEQ ID NO: 422 - protein, 39 aa, Artificial Sequence; identical to SEQ ID NO: 412
  Synthetic Construct
  MISC_FEATURE (2)..(2): Xaa at position 2 is Aib
  MISC_FEATURE (6)..(6): Xaa at position 6 is alpha-methyl-Phe(2F)
  MISC_FEATURE (11)..(11): Xaa at position 11 is Aib
  MISC_FEATURE (13)..(13): Xaa at position 13 is alpha-methyl-Leu
  MISC_FEATURE (16)..(16): Xaa at position 16 is Orn
  MISC_FEATURE (20)..(20): Xaa at position 20 is Aib
  MOD_RES (24)..(24): Lys at position 24 is chemically modified by conjugation of the epsilon-amino group of the Lys side chain with (2-[2-(2-amino-ethoxy)-ethoxy]-acetyl)2-(gamma-Glu)-CO-(CH2)12-CO 2H
  MISC_FEATURE (25)..(25): Xaa at position 25 is alpha-methyl-Tyr
  MOD_RES (28)..(28): Lys at position 28 is chemically modified by conjugation of the epsilon-amino group of the Lys side chain with (2-[2-(2-amino-ethoxy)-ethoxy]-acetyl)2-(gamma-Glu)-CO-(CH2)12-CO 2H
  MOD_RES (39)..(39): Ser at position 39 is amidated

SEQ ID NO: 423 - protein, 39 aa, Artificial Sequence; identical to SEQ ID NO: 416
  Synthetic Construct
  MISC_FEATURE (2)..(2): Xaa at position 2 is Aib
  MISC_FEATURE (6)..(6): Xaa at position 6 is alpha-methyl-Phe(2F)
  MISC_FEATURE (10)..(10): Xaa at position 10 is 4Pal
  MISC_FEATURE (11)..(11): Xaa at position 11 is Aib
  MISC_FEATURE (13)..(13): Xaa at position 13 is alpha-methyl-Leu
  MISC_FEATURE (16)..(16): Xaa at position 16 is Orn
  MOD_RES (17)..(17): Lys at position 17 is chemically modified by conjugation of the epsilon-amino group of the Lys side chain with (2-[2-(2-amino-ethoxy)-ethoxy]-acetyl)2-(gamma-Glu)-CO-(CH2)10-CH 3
  MISC_FEATURE (20)..(20): Xaa at position 20 is Aib
  MOD_RES (21)..(21): Lys at position 21 is chemically modified by conjugation of the epsilon-amino group of the Lys side chain with (2-[2-(2-amino-ethoxy)-ethoxy]-acetyl)2-(gamma-Glu)-CO-(CH2)10-CH 3
  MISC_FEATURE (24)..(24): Xaa at position 24 is D-Glu
  MISC_FEATURE (25)..(25): Xaa at position 25 is alpha-methyl-Tyr
  MISC_FEATURE (28)..(28): Xaa at position 28 is Orn
  MOD_RES (39)..(39): Ser at position 39 is amidated

SEQ ID NO: 424 - protein, 39 aa, Artificial Sequence; identical to SEQ ID NO: 361
  Synthetic Construct
  MISC_FEATURE (2)..(2): Xaa at position 2 is Aib
  MISC_FEATURE (6)..(6): Xaa at position 6 is alpha-methyl-Phe(2F)
  MISC_FEATURE (10)..(10): Xaa at position 10 is 4Pal
  MISC_FEATURE (11)..(11): Xaa at position 11 is Aib
  MISC_FEATURE (13)..(13): Xaa at position 13 is alpha-methyl-Leu
  MISC_FEATURE (16)..(16): Xaa at position 16 is Orn
  MOD_RES (17)..(17): Lys at position 17 is chemically modified by conjugation of the epsilon-amino group of the Lys side chain with (2-[2-(2-amino-ethoxy)-ethoxy]-acetyl)2-(gamma-Glu)-CO-(CH2)10-CH 3
  MISC_FEATURE (20)..(20): Xaa at position 20 is Aib
  MISC_FEATURE (21)..(21): Xaa at position 21 is Orn
  MISC_FEATURE (24)..(24): Xaa at position 24 is D-Glu
  MISC_FEATURE (25)..(25): Xaa at position 25 is alpha-methyl-Tyr
  MOD_RES (28)..(28): Lys at position 28 is chemically modified by conjugation of the epsilon-amino group of the Lys side chain with (2-[2-(2-amino-ethoxy)-ethoxy]-acetyl)2-(gamma-Glu)-CO-(CH2)10-CH 3
  MOD_RES (39)..(39): Ser at position 39 is amidated

SEQ ID NO: 425 - protein, 39 aa, Artificial Sequence
  Synthetic Construct
  MISC_FEATURE (2)..(2): Xaa at position 2 is Aib
  MISC_FEATURE (6)..(6): Xaa at position 6 is alpha-methyl-Phe(2F)
  MOD_RES (10)..(10): Lys at position 10 is chemically modified by conjugation of the epsilon-amino group of the Lys side chain with (2-[2-(2-amino-ethoxy)-ethoxy]-acetyl)2-(gamma-Glu)-CO-(CH2)10-CH 3
  MISC_FEATURE (11)..(11): Xaa at position 11 is Aib
  MISC_FEATURE (13)..(13): Xaa at position 13 is alpha-methyl-Leu
  MISC_FEATURE (16)..(16): Xaa at position 16 is Orn
  MOD_RES (17)..(17): Lys at position 17 is chemically modified by conjugation of the epsilon-amino group of the Lys side chain with (2-[2-(2-amino-ethoxy)-ethoxy]-acetyl)2-(gamma-Glu)-CO-(CH2)10-CH 3
  MISC_FEATURE (20)..(20): Xaa at position 20 is Aib
  MISC_FEATURE (21)..(21): Xaa at position 21 is 4Pal
  MISC_FEATURE (24)..(24): Xaa at position 24 is D-Glu
  MISC_FEATURE (25)..(25): Xaa at position 25 is alpha-methyl-Tyr
  MOD_RES (39)..(39): Ser at position 39 is amidated
YXEGTXTSDKXIXLDXKAQXXFIXXLIEGGPSSGAPPPS

SEQ ID NO: 426 - protein, 39 aa, Artificial Sequence; identical to SEQ ID NO: 361
  Synthetic Construct
  MISC_FEATURE (2)..(2): Xaa at position 2 is Aib
  MISC_FEATURE (6)..(6): Xaa at position 6 is alpha-methyl-Phe(2F)
  MISC_FEATURE (10)..(10): Xaa at position 10 is 4Pal
  MISC_FEATURE (11)..(11): Xaa at position 11 is Aib
  MISC_FEATURE (13)..(13): Xaa at position 13 is alpha-methyl-Leu
  MISC_FEATURE (16)..(16): Xaa at position 16 is Orn
  MOD_RES (17)..(17): Lys at position 17 is chemically modified by conjugation of the epsilon-amino group of the Lys side chain with (2-[2-(2-amino-ethoxy)-ethoxy]-acetyl)2-(gamma-Glu)-CO-(CH2)10-CH 3
  MISC_FEATURE (20)..(20): Xaa at position 20 is Aib
  MISC_FEATURE (21)..(21): Xaa at position 21 is 4Pal
  MISC_FEATURE (24)..(24): Xaa at position 24 is D-Glu
  MISC_FEATURE (25)..(25): Xaa at position 25 is alpha-methyl-Tyr
  MOD_RES (28)..(28): Lys at position 28 is chemically modified by conjugation of the epsilon-amino group of the Lys side chain with (2-[2-(2-amino-ethoxy)-ethoxy]-acetyl)2-(gamma-Glu)-CO-(CH2)10-CH 3
  MOD_RES (39)..(39): Ser at position 39 is amidated

SEQ ID NO: 427 - protein, 39 aa, Artificial Sequence; identical to SEQ ID NO: 425
  Synthetic Construct
  MISC_FEATURE (2)..(2): Xaa at position 2 is Aib
  MISC_FEATURE (6)..(6): Xaa at position 6 is alpha-methyl-Phe(2F)
  MOD_RES (10)..(10): Lys at position 10 is chemically modified by conjugation of the epsilon-amino group of the Lys side chain with (2-[2-(2-amino-ethoxy)-ethoxy]-acetyl)2-(gamma-Glu)-CO-(CH2)10-CH 3
  MISC_FEATURE (11)..(11): Xaa at position 11 is Aib
  MISC_FEATURE (13)..(13): Xaa at position 13 is alpha-methyl-Leu
  MISC_FEATURE (16)..(16): Xaa at position 16 is Orn
  MOD_RES (17)..(17): Lys at position 17 is chemically modified by conjugation of the epsilon-amino group of the Lys side chain with (2-[2-(2-amino-ethoxy)-ethoxy]-acetyl)2-(gamma-Glu)-CO-(CH2)10-CH 3
  MISC_FEATURE (20)..(20): Xaa at position 20 is Aib
  MISC_FEATURE (21)..(21): Xaa at position 21 is Orn
  MISC_FEATURE (24)..(24): Xaa at position 24 is D-Glu
  MISC_FEATURE (25)..(25): Xaa at position 25 is alpha-methyl-Tyr
  MOD_RES (39)..(39): Ser at position 39 is amidated

SEQ ID NO: 428 - protein, 40 aa, Artificial Sequence
  Synthetic Construct
  MISC_FEATURE (2)..(2): Xaa at position 2 is Aib
  MISC_FEATURE (6)..(6): Xaa at position 6 is alpha-methyl-Phe(2F)
  MISC_FEATURE (10)..(10): Xaa at position 10 is 4Pal
  MISC_FEATURE (11)..(11): Xaa at position 11 is Aib
  MISC_FEATURE (13)..(13): Xaa at position 13 is alpha-methyl-Leu
  MISC_FEATURE (16)..(16): Xaa at position 16 is Orn
  MOD_RES (17)..(17): Lys at position 17 is chemically modified by conjugation of the epsilon-amino group of the Lys side chain with (2-[2-(2-amino-ethoxy)-ethoxy]-acetyl)2-(gamma-Glu)-CO-(CH2)10-CH 3
  MISC_FEATURE (20)..(20): Xaa at position 20 is Aib
  MISC_FEATURE (21)..(21): Xaa at position 21 is Orn
  MISC_FEATURE (24)..(24): Xaa at position 24 is D-Glu
  MISC_FEATURE (25)..(25): Xaa at position 25 is alpha-methyl-Tyr
  MOD_RES (40)..(40): Lys at position 40 is chemically modified by conjugation of the epsilon-amino group of the Lys side chain with (2-[2-(2-amino-ethoxy)-ethoxy]-acetyl)2-(gamma-Glu)-CO-(CH2)10-CH 3
  MOD_RES (40)..(40): Lys at position 40 is amidated
YXEGTXTSDXXIXLDXKAQXXFIXXLIEGGPSSGAPPPSK

SEQ ID NO: 429 - protein, 39 aa, Artificial Sequence
  Synthetic Construct
  MISC_FEATURE (2)..(2): Xaa at position 2 is Aib
  MISC_FEATURE (6)..(6): Xaa at position 6 is alpha-methyl-Phe(2F)
  MISC_FEATURE (10)..(10): Xaa at position 10 is 4Pal
  MISC_FEATURE (11)..(11): Xaa at position 11 is Aib
  MISC_FEATURE (13)..(13): Xaa at position 13 is alpha-methyl-Leu
  MISC_FEATURE (16)..(16): Xaa at position 16 is Orn
  MOD_RES (17)..(17): Lys at position 17 is chemically modified by conjugation of the epsilon-amino group of the Lys side chain with (2-[2-(2-amino-ethoxy)-ethoxy]-acetyl)2-(gamma-Glu)-CO-(CH2)10-CH 3
  MISC_FEATURE (20)..(20): Xaa at position 20 is Aib
  MISC_FEATURE (24)..(24): Xaa at position 24 is D-Glu
  MISC_FEATURE (25)..(25): Xaa at position 25 is alpha-methyl-Tyr
  MOD_RES (28)..(28): Lys at position 28 is chemically modified by conjugation of the epsilon-amino group of the Lys side chain with (2-[2-(2-amino-ethoxy)-ethoxy]-acetyl)2-(gamma-Glu)-CO-(CH2)10-CH 3
  MOD_RES (39)..(39): Ser at position 39 is amidated
YXEGTXTSDXXIXLDXKAQXTFIXXLIKGGPSSGAPPPS

SEQ ID NO: 430 - protein, 40 aa, Artificial Sequence; identical to SEQ ID NO: 428
  Synthetic Construct
  MISC_FEATURE (2)..(2): Xaa at position 2 is Aib
  MISC_FEATURE (6)..(6): Xaa at position 6 is alpha-methyl-Phe(2F)
  MISC_FEATURE (10)..(10): Xaa at position 10 is 4Pal
  MISC_FEATURE (11)..(11): Xaa at position 11 is Aib
  MISC_FEATURE (13)..(13): Xaa at position 13 is alpha-methyl-Leu
  MISC_FEATURE (16)..(16): Xaa at position 16 is Orn
  MOD_RES (17)..(17): Lys at position 17 is chemically modified by conjugation of the epsilon-amino group of the Lys side chain with (2-[2-(2-amino-ethoxy)-ethoxy]-acetyl)2-(gamma-Glu)-CO-(CH2)10-CH 3
  MISC_FEATURE (20)..(20): Xaa at position 20 is Aib
  MISC_FEATURE (21)..(21): Xaa at position 21 is 4Pal
  MISC_FEATURE (24)..(24): Xaa at position 24 is D-Glu
  MISC_FEATURE (25)..(25): Xaa at position 25 is alpha-methyl-Tyr
  MOD_RES (40)..(40): Lys at position 40 is chemically modified by conjugation of the epsilon-amino group of the Lys side chain with (2-[2-(2-amino-ethoxy)-ethoxy]-acetyl)2-(gamma-Glu)-CO-(CH2)10-CH 3
  MOD_RES (40)..(40): Lys at position 40 is amidated

SEQ ID NO: 431 - protein, 39 aa, Artificial Sequence; identical to SEQ ID NO: 302
  Synthetic Construct
  MISC_FEATURE (2)..(2): Xaa at position 2 is Aib
  MISC_FEATURE (6)..(6): Xaa at position 6 is alpha-methyl-Phe(2F)
  MOD_RES (10)..(10): Lys at position 10 is chemically modified by conjugation of the epsilon-amino group of the Lys side chain with (2-[2-(2-amino-ethoxy)-ethoxy]-acetyl)3-(gamma-Glu)-CO-(CH2)10-CH 3
  MISC_FEATURE (11)..(11): Xaa at position 11 is Aib
  MISC_FEATURE (13)..(13): Xaa at position 13 is alpha-methyl-Leu
  MISC_FEATURE (16)..(16): Xaa at position 16 is Orn
  MOD_RES (17)..(17): Lys at position 17 is chemically modified by conjugation of the epsilon-amino group of the Lys side chain with (2-[2-(2-amino-ethoxy)-ethoxy]-acetyl)3-(gamma-Glu)-CO-(CH2)10-CH 3
  MISC_FEATURE (20)..(20): Xaa at position 20 is Aib
  MISC_FEATURE (24)..(24): Xaa at position 24 is D-Glu
  MISC_FEATURE (25)..(25): Xaa at position 25 is alpha-methyl-Tyr
  MOD_RES (39)..(39): Ser at position 39 is amidated

SEQ ID NO: 432 - protein, 39 aa, Artificial Sequence; identical to SEQ ID NO: 253
  Synthetic Construct
  MISC_FEATURE (2)..(2): Xaa at position 2 is Aib
  MISC_FEATURE (6)..(6): Xaa at position 6 is alpha-methyl-Phe(2F)
  MISC_FEATURE (10)..(10): Xaa at position 10 is 4Pal
  MISC_FEATURE (11)..(11): Xaa at position 11 is Aib
  MISC_FEATURE (13)..(13): Xaa at position 13 is alpha-methyl-Leu
  MISC_FEATURE (16)..(16): Xaa at position 16 is Orn
  MOD_RES (17)..(17): Lys at position 17 is chemically modified by conjugation of the epsilon-amino group of the Lys side chain with (2-[2-(2-amino-ethoxy)-ethoxy]-acetyl)3-(gamma-Glu)-CO-(CH2)10-CH 3
  MISC_FEATURE (20)..(20): Xaa at position 20 is Aib
  MOD_RES (21)..(21): Lys at position 21 is chemically modified by conjugation of the epsilon-amino group of the Lys side chain with (2-[2-(2-amino-ethoxy)-ethoxy]-acetyl)3-(gamma-Glu)-CO-(CH2)10-CH 3
  MISC_FEATURE (24)..(24): Xaa at position 24 is D-Glu
  MISC_FEATURE (25)..(25): Xaa at position 25 is alpha-methyl-Tyr
  MOD_RES (39)..(39): Ser at position 39 is amidated

SEQ ID NO: 433 - protein, 39 aa, Artificial Sequence; identical to SEQ ID NO: 254
  Synthetic Construct
  MISC_FEATURE (2)..(2): Xaa at position 2 is Aib
  MISC_FEATURE (6)..(6): Xaa at position 6 is alpha-methyl-Phe(2F)
  MISC_FEATURE (10)..(10): Xaa at position 10 is 4Pal
  MISC_FEATURE (11)..(11): Xaa at position 11 is Aib
  MISC_FEATURE (13)..(13): Xaa at position 13 is alpha-methyl-Leu
  MISC_FEATURE (16)..(16): Xaa at position 16 is Orn
  MOD_RES (17)..(17): Lys at position 17 is chemically modified by conjugation of the epsilon-amino group of the Lys side chain with (2-[2-(2-amino-ethoxy)-ethoxy]-acetyl)3-(gamma-Glu)-CO-(CH2)10-CH 3
  MISC_FEATURE (20)..(20): Xaa at position 20 is Aib
  MISC_FEATURE (24)..(24): Xaa at position 24 is D-Glu
  MISC_FEATURE (25)..(25): Xaa at position 25 is alpha-methyl-Tyr
  MOD_RES (28)..(28): Lys at position 28 is chemically modified by conjugation of the epsilon-amino group of the Lys side chain with (2-[2-(2-amino-ethoxy)-ethoxy]-acetyl)3-(gamma-Glu)-CO-(CH2)10-CH 3
  MOD_RES (39)..(39): Ser at position 39 is amidated

SEQ ID NO: 434 - protein, 40 aa, Artificial Sequence; identical to SEQ ID NO: 255
  Synthetic Construct
  MISC_FEATURE (2)..(2): Xaa at position 2 is Aib
  MISC_FEATURE (6)..(6): Xaa at position 6 is alpha-methyl-Phe(2F)
  MISC_FEATURE (10)..(10): Xaa at position 10 is 4Pal
  MISC_FEATURE (11)..(11): Xaa at position 11 is Aib
  MISC_FEATURE (13)..(13): Xaa at position 13 is alpha-methyl-Leu
  MISC_FEATURE (16)..(16): Xaa at position 16 is Orn
  MOD_RES (17)..(17): Lys at position 17 is chemically modified by conjugation of the epsilon-amino group of the Lys side chain with (2-[2-(2-amino-ethoxy)-ethoxy]-acetyl)3-(gamma-Glu)-CO-(CH2)10-CH 3
  MISC_FEATURE (20)..(20): Xaa at position 20 is Aib
  MISC_FEATURE (24)..(24): Xaa at position 24 is D-Glu
  MISC_FEATURE (25)..(25): Xaa at position 25 is alpha-methyl-Tyr
  MOD_RES (40)..(40): Lys at position 40 is chemically modified by conjugation of the epsilon-amino group of the Lys side chain with (2-[2-(2-amino-ethoxy)-ethoxy]-acetyl)3-(gamma-Glu)-CO-(CH2)10-CH 3
  MOD_RES (40)..(40): Lys at position 40 is amidated

SEQ ID NO: 435 - protein, 39 aa, Artificial Sequence; identical to SEQ ID NO: 302
  Synthetic Construct
  MISC_FEATURE (2)..(2): Xaa at position 2 is Aib
  MISC_FEATURE (6)..(6): Xaa at position 6 is alpha-methyl-Phe(2F)
  MOD_RES (10)..(10): Lys at position 10 is chemically modified by conjugation of the epsilon-amino group of the Lys side chain with (2-[2-(2-amino-ethoxy)-ethoxy]-acetyl)-(gamma-Glu)-CO-(CH2)10-CH3
  MISC_FEATURE (11)..(11): Xaa at position 11 is Aib
  MISC_FEATURE (13)..(13): Xaa at position 13 is alpha-methyl-Leu
  MISC_FEATURE (16)..(16): Xaa at position 16 is Orn
  MOD_RES (17)..(17): Lys at position 17 is chemically modified by conjugation of the epsilon-amino group of the Lys side chain with (2-[2-(2-amino-ethoxy)-ethoxy]-acetyl)-(gamma-Glu)-CO-(CH2)10-CH3
  MISC_FEATURE (20)..(20): Xaa at position 20 is Aib
  MISC_FEATURE (24)..(24): Xaa at position 24 is D-Glu
  MISC_FEATURE (25)..(25): Xaa at position 25 is alpha-methyl-Tyr
  MOD_RES (39)..(39): Ser at position 39 is amidated

SEQ ID NO: 436 - protein, 39 aa, Artificial Sequence; identical to SEQ ID NO: 253
  Synthetic Construct
  MISC_FEATURE (2)..(2): Xaa at position 2 is Aib
  MISC_FEATURE (6)..(6): Xaa at position 6 is alpha-methyl-Phe(2F)
  MISC_FEATURE (10)..(10): Xaa at position 10 is 4Pal
  MISC_FEATURE (11)..(11): Xaa at position 11 is Aib
  MISC_FEATURE (13)..(13): Xaa at position 13 is alpha-methyl-Leu
  MISC_FEATURE (16)..(16): Xaa at position 16 is Orn
  MOD_RES (17)..(17): Lys at position 17 is chemically modified by conjugation of the epsilon-amino group of the Lys side chain with (2-[2-(2-amino-ethoxy)-ethoxy]-acetyl)-(gamma-Glu)-CO-(CH2)10-CH3
  MISC_FEATURE (20)..(20): Xaa at position 20 is Aib
  MOD_RES (21)..(21): Lys at position 21 is chemically modified by conjugation of the epsilon-amino group of the Lys side chain with (2-[2-(2-amino-ethoxy)-ethoxy]-acetyl)-(gamma-Glu)-CO-(CH2)10-CH3
  MISC_FEATURE (24)..(24): Xaa at position 24 is D-Glu
  MISC_FEATURE (25)..(25): Xaa at position 25 is alpha-methyl-Tyr
  MOD_RES (39)..(39): Ser at position 39 is amidated

SEQ ID NO: 437 - protein, 39 aa, Artificial Sequence; identical to SEQ ID NO: 254
  Synthetic Construct
  MISC_FEATURE (2)..(2): Xaa at position 2 is Aib
  MISC_FEATURE (6)..(6): Xaa at position 6 is alpha-methyl-Phe(2F)
  MISC_FEATURE (10)..(10): Xaa at position 10 is 4Pal
  MISC_FEATURE (11)..(11): Xaa at position 11 is Aib
  MISC_FEATURE (13)..(13): Xaa at position 13 is alpha-methyl-Leu
  MISC_FEATURE (16)..(16): Xaa at position 16 is Orn
  MOD_RES (17)..(17): Lys at position 17 is chemically modified by conjugation of the epsilon-amino group of the Lys side chain with (2-[2-(2-amino-ethoxy)-ethoxy]-acetyl)-(gamma-Glu)-CO-(CH2)10-CH3
  MISC_FEATURE (20)..(20): Xaa at position 20 is Aib
  MISC_FEATURE (24)..(24): Xaa at position 24 is D-Glu
  MISC_FEATURE (25)..(25): Xaa at position 25 is alpha-methyl-Tyr
  MOD_RES (28)..(28): Lys at position 28 is chemically modified by conjugation of the epsilon-amino group of the Lys side chain with (2-[2-(2-amino-ethoxy)-ethoxy]-acetyl)-(gamma-Glu)-CO-(CH2)10-CH3
  MOD_RES (39)..(39): Ser at position 39 is amidated

SEQ ID NO: 438 - protein, 40 aa, Artificial Sequence; identical to SEQ ID NO: 255
  Synthetic Construct
  MISC_FEATURE (2)..(2): Xaa at position 2 is Aib
  MISC_FEATURE (6)..(6): Xaa at position 6 is alpha-methyl-Phe(2F)
  MISC_FEATURE (10)..(10): Xaa at position 10 is 4Pal
  MISC_FEATURE (11)..(11): Xaa at position 11 is Aib
  MISC_FEATURE (13)..(13): Xaa at position 13 is alpha-methyl-Leu
  MISC_FEATURE (16)..(16): Xaa at position 16 is Orn
  MOD_RES (17)..(17): Lys at position 17 is chemically modified by conjugation of the epsilon-amino group of the Lys side chain with (2-[2-(2-amino-ethoxy)-ethoxy]-acetyl)-(gamma-Glu)-CO-(CH2)10-CH3
  MISC_FEATURE (20)..(20): Xaa at position 20 is Aib
  MISC_FEATURE (24)..(24): Xaa at position 24 is D-Glu
  MISC_FEATURE (25)..(25): Xaa at position 25 is alpha-methyl-Tyr
  MOD_RES (40)..(40): Lys at position 40 is chemically modified by conjugation of the epsilon-amino group of the Lys side chain with (2-[2-(2-amino-ethoxy)-ethoxy]-acetyl)-(gamma-Glu)-CO-(CH2)10-CH3
  MOD_RES (40)..(40): Lys at position 40 is amidated

SEQ ID NO: 439 - protein, 39 aa, Artificial Sequence
  Synthetic Construct
  MISC_FEATURE (2)..(2): Xaa at position 2 is Aib
  MISC_FEATURE (6)..(6): Xaa at position 6 is alpha-methyl-Phe(2F)
  MOD_RES (10)..(10): Lys at position 10 is chemically modified by conjugation of the epsilon-amino group of the Lys side chain with (2-[2-(2-amino-ethoxy)-ethoxy]-acetyl)2-(gamma-Glu)-CO-(CH2)10-CH 3
  MISC_FEATURE (11)..(11): Xaa at position 11 is Aib
  MISC_FEATURE (13)..(13): Xaa at position 13 is alpha-methyl-Leu
  MISC_FEATURE (16)..(16): Xaa at position 16 is Orn
  MOD_RES (17)..(17): Lys at position 17 is chemically modified by conjugation of the epsilon-amino group of the Lys side chain with (2-[2-(2-amino-ethoxy)-ethoxy]-acetyl)2-(gamma-Glu)-CO-(CH2)10-CH 3
  MISC_FEATURE (20)..(20): Xaa at position 20 is Aib
  MISC_FEATURE (22)..(22): Xaa at position 22 is alpha-methyl-Phe
  MISC_FEATURE (24)..(24): Xaa at position 24 is D-Glu
  MISC_FEATURE (25)..(25): Xaa at position 25 is alpha-methyl-Tyr
  MOD_RES (39)..(39): Ser at position 39 is amidated
YXEGTXTSDKXIXLDXKAQXEXIXXLIEGGPSSGAPPPS

SEQ ID NO: 440 - protein, 39 aa, Artificial Sequence
  Synthetic Construct
  MISC_FEATURE (2)..(2): Xaa at position 2 is Aib
  MISC_FEATURE (6)..(6): Xaa at position 6 is alpha-methyl-Phe(2F)
  MISC_FEATURE (10)..(10): Xaa at position 10 is 4Pal
  MISC_FEATURE (11)..(11): Xaa at position 11 is Aib
  MISC_FEATURE (13)..(13): Xaa at position 13 is alpha-methyl-Leu
  MISC_FEATURE (16)..(16): Xaa at position 16 is Orn
  MOD_RES (17)..(17): Lys at position 17 is chemically modified by conjugation of the epsilon-amino group of the Lys side chain with (2-[2-(2-amino-ethoxy)-ethoxy]-acetyl)2-(gamma-Glu)-CO-(CH2)10-CH 3
  MISC_FEATURE (20)..(20): Xaa at position 20 is Aib
  MOD_RES (21)..(21): Lys at position 21 is chemically modified by conjugation of the epsilon-amino group of the Lys side chain with (2-[2-(2-amino-ethoxy)-ethoxy]-acetyl)2-(gamma-Glu)-CO-(CH2)10-CH 3
  MISC_FEATURE (22)..(22): Xaa at position 22 is alpha-methyl-Phe
  MISC_FEATURE (24)..(24): Xaa at position 24 is D-Glu
  MISC_FEATURE (25)..(25): Xaa at position 25 is alpha-methyl-Tyr
  MOD_RES (39)..(39): Ser at position 39 is amidated
YXEGTXTSDXXIXLDXKAQXKXIXXLIEGGPSSGAPPPS

SEQ ID NO: 441 - protein, 40 aa, Artificial Sequence
  Synthetic Construct
  MISC_FEATURE (2)..(2): Xaa at position 2 is Aib
  MISC_FEATURE (6)..(6): Xaa at position 6 is alpha-methyl-Phe(2F)
  MISC_FEATURE (10)..(10): Xaa at position 10 is 4Pal
  MISC_FEATURE (11)..(11): Xaa at position 11 is Aib
  MISC_FEATURE (13)..(13): Xaa at position 13 is alpha-methyl-Leu
  MISC_FEATURE (16)..(16): Xaa at position 16 is Orn
  MOD_RES (17)..(17): Lys at position 17 is chemically modified by conjugation of the epsilon-amino group of the Lys side chain with (2-[2-(2-amino-ethoxy)-ethoxy]-acetyl)2-(gamma-Glu)-CO-(CH2)10-CH 3
  MISC_FEATURE (20)..(20): Xaa at position 20 is Aib
  MISC_FEATURE (22)..(22): Xaa at position 22 is alpha-methyl-Phe
  MISC_FEATURE (24)..(24): Xaa at position 24 is D-Glu
  MISC_FEATURE (25)..(25): Xaa at position 25 is alpha-methyl-Tyr
  MOD_RES (40)..(40): Lys at position 40 is chemically modified by conjugation of the epsilon-amino group of the Lys side chain with (2-[2-(2-amino-ethoxy)-ethoxy]-acetyl)2-(gamma-Glu)-CO-(CH2)10-CH 3
  MOD_RES (40)..(40): Lys at position 40 is amidated
YXEGTXTSDXXIXLDXKAQXEXIXXLIEGGPSSGAPPPSK

SEQ ID NO: 442 - protein, 39 aa, Artificial Sequence; identical to SEQ ID NO: 425
  Synthetic Construct
  MISC_FEATURE (2)..(2): Xaa at position 2 is Aib
  MISC_FEATURE (6)..(6): Xaa at position 6 is alpha-methyl-Phe(2F)
  MOD_RES (10)..(10): Lys at position 10 is chemically modified by conjugation of the epsilon-amino group of the Lys side chain with (2-[2-(2-amino-ethoxy)-ethoxy]-acetyl)3-(gamma-Glu)-CO-(CH2)10-CH 3
  MISC_FEATURE (11)..(11): Xaa at position 11 is Aib
  MISC_FEATURE (13)..(13): Xaa at position 13 is alpha-methyl-Leu
  MISC_FEATURE (16)..(16): Xaa at position 16 is Orn
  MOD_RES (17)..(17): Lys at position 17 is chemically modified by conjugation of the epsilon-amino group of the Lys side chain with (2-[2-(2-amino-ethoxy)-ethoxy]-acetyl)3-(gamma-Glu)-CO-(CH2)10-CH 3
  MISC_FEATURE (20)..(20): Xaa at position 20 is Aib
  MISC_FEATURE (21)..(21): Xaa at position 21 is Orn
  MISC_FEATURE (24)..(24): Xaa at position 24 is D-Glu
  MISC_FEATURE (25)..(25): Xaa at position 25 is alpha-methyl-Tyr
  MOD_RES (39)..(39): Ser at position 39 is amidated

SEQ ID NO: 443 - protein, 39 aa, Artificial Sequence; identical to SEQ ID NO: 416
  Synthetic Construct
  MISC_FEATURE (2)..(2): Xaa at position 2 is Aib
  MISC_FEATURE (6)..(6): Xaa at position 6 is alpha-methyl-Phe(2F)
  MISC_FEATURE (10)..(10): Xaa at position 10 is 4Pal
  MISC_FEATURE (11)..(11): Xaa at position 11 is Aib
  MISC_FEATURE (13)..(13): Xaa at position 13 is alpha-methyl-Leu
  MISC_FEATURE (16)..(16): Xaa at position 16 is Orn
  MOD_RES (17)..(17): Lys at position 17 is chemically modified by conjugation of the epsilon-amino group of the Lys side chain with (2-[2-(2-amino-ethoxy)-ethoxy]-acetyl)3-(gamma-Glu)-CO-(CH2)10-CH 3
  MISC_FEATURE (20)..(20): Xaa at position 20 is Aib
  MOD_RES (21)..(21): Lys at position 21 is chemically modified by conjugation of the epsilon-amino group of the Lys side chain with (2-[2-(2-amino-ethoxy)-ethoxy]-acetyl)3-(gamma-Glu)-CO-(CH2)10-CH 3
  MISC_FEATURE (24)..(24): Xaa at position 24 is D-Glu
  MISC_FEATURE (25)..(25): Xaa at position 25 is alpha-methyl-Tyr
  MISC_FEATURE (28)..(28): Xaa at position 28 is Orn
  MOD_RES (39)..(39): Ser at position 39 is amidated

SEQ ID NO: 444 - protein, 39 aa, Artificial Sequence; identical to SEQ ID NO: 361
  Synthetic Construct
  MISC_FEATURE (2)..(2): Xaa at position 2 is Aib
  MISC_FEATURE (6)..(6): Xaa at position 6 is alpha-methyl-Phe(2F)
  MISC_FEATURE (10)..(10): Xaa at position 10 is 4Pal
  MISC_FEATURE (11)..(11): Xaa at position 11 is Aib
  MISC_FEATURE (13)..(13): Xaa at position 13 is alpha-methyl-Leu
  MISC_FEATURE (16)..(16): Xaa at position 16 is Orn
  MOD_RES (17)..(17): Lys at position 17 is chemically modified by conjugation of the epsilon-amino group of the Lys side chain with (2-[2-(2-amino-ethoxy)-ethoxy]-acetyl)3-(gamma-Glu)-CO-(CH2)10-CH 3
  MISC_FEATURE (20)..(20): Xaa at position 20 is Aib
  MISC_FEATURE (21)..(21): Xaa at position 21 is Orn
  MISC_FEATURE (24)..(24): Xaa at position 24 is D-Glu
  MISC_FEATURE (25)..(25): Xaa at position 25 is alpha-methyl-Tyr
  MOD_RES (28)..(28): Lys at position 28 is chemically modified by conjugation of the epsilon-amino group of the Lys side chain with (2-[2-(2-amino-ethoxy)-ethoxy]-acetyl)3-(gamma-Glu)-CO-(CH2)10-CH 3
  MOD_RES (39)..(39): Ser at position 39 is amidated

SEQ ID NO: 445 - protein, 40 aa, Artificial Sequence; identical to SEQ ID NO: 428
  Synthetic Construct
  MISC_FEATURE (2)..(2): Xaa at position 2 is Aib
  MISC_FEATURE (6)..(6): Xaa at position 6 is alpha-methyl-Phe(2F)
  MISC_FEATURE (10)..(10): Xaa at position 10 is 4Pal
  MISC_FEATURE (11)..(11): Xaa at position 11 is Aib
  MISC_FEATURE (13)..(13): Xaa at position 13 is alpha-methyl-Leu
  MISC_FEATURE (16)..(16): Xaa at position 16 is Orn
  MOD_RES (17)..(17): Lys at position 17 is chemically modified by conjugation of the epsilon-amino group of the Lys side chain with (2-[2-(2-amino-ethoxy)-ethoxy]-acetyl)3-(gamma-Glu)-CO-(CH2)10-CH 3
  MISC_FEATURE (20)..(20): Xaa at position 20 is Aib
  MISC_FEATURE (21)..(21): Xaa at position 21 is Orn
  MISC_FEATURE (24)..(24): Xaa at position 24 is D-Glu
  MISC_FEATURE (25)..(25): Xaa at position 25 is alpha-methyl-Tyr
  MOD_RES (40)..(40): Lys at position 40 is chemically modified by conjugation of the epsilon-amino group of the Lys side chain with (2-[2-(2-amino-ethoxy)-ethoxy]-acetyl)3-(gamma-Glu)-CO-(CH2)10-CH 3
  MOD_RES (40)..(40): Lys at position 40 is amidated

SEQ ID NO: 446 - protein, 39 aa, Artificial Sequence; identical to SEQ ID NO: 439
  Synthetic Construct
  MISC_FEATURE (2)..(2): Xaa at position 2 is Aib
  MISC_FEATURE (6)..(6): Xaa at position 6 is alpha-methyl-Phe(2F)
  MOD_RES (10)..(10): Lys at position 10 is chemically modified by conjugation of the epsilon-amino group of the Lys side chain with (2-[2-(2-amino-ethoxy)-ethoxy]-acetyl)3-(gamma-Glu)-CO-(CH2)10-CH 3
  MISC_FEATURE (11)..(11): Xaa at position 11 is Aib
  MISC_FEATURE (13)..(13): Xaa at position 13 is alpha-methyl-Leu
  MISC_FEATURE (16)..(16): Xaa at position 16 is Orn
  MOD_RES (17)..(17): Lys at position 17 is chemically modified by conjugation of the epsilon-amino group of the Lys side chain with (2-[2-(2-amino-ethoxy)-ethoxy]-acetyl)3-(gamma-Glu)-CO-(CH2)10-CH 3
  MISC_FEATURE (20)..(20): Xaa at position 20 is Aib
  MISC_FEATURE (22)..(22): Xaa at position 22 is alpha-methyl-Phe
  MISC_FEATURE (24)..(24): Xaa at position 24 is D-Glu
  MISC_FEATURE (25)..(25): Xaa at position 25 is alpha-methyl-Tyr
  MOD_RES (39)..(39): Ser at position 39 is amidated

SEQ ID NO: 447 - protein, 39 aa, Artificial Sequence; identical to SEQ ID NO: 440
  Synthetic Construct
  MISC_FEATURE (2)..(2): Xaa at position 2 is Aib
  MISC_FEATURE (6)..(6): Xaa at position 6 is alpha-methyl-Phe(2F)
  MISC_FEATURE (10)..(10): Xaa at position 10 is 4Pal
  MISC_FEATURE (11)..(11): Xaa at position 11 is Aib
  MISC_FEATURE (13)..(13): Xaa at position 13 is alpha-methyl-Leu
  MISC_FEATURE (16)..(16): Xaa at position 16 is Orn
  MOD_RES (17)..(17): Lys at position 17 is chemically modified by conjugation of the epsilon-amino group of the Lys side chain with (2-[2-(2-amino-ethoxy)-ethoxy]-acetyl)3-(gamma-Glu)-CO-(CH2)10-CH 3
  MISC_FEATURE (20)..(20): Xaa at position 20 is Aib
  MOD_RES (21)..(21): Lys at position 21 is chemically modified by conjugation of the epsilon-amino group of the Lys side chain with (2-[2-(2-amino-ethoxy)-ethoxy]-acetyl)3-(gamma-Glu)-CO-(CH2)10-CH 3
  MISC_FEATURE (22)..(22): Xaa at position 22 is alpha-methyl-Phe
  MISC_FEATURE (24)..(24): Xaa at position 24 is D-Glu
  MISC_FEATURE (25)..(25): Xaa at position 25 is alpha-methyl-Tyr
  MOD_RES (39)..(39): Ser at position 39 is amidated

SEQ ID NO: 448 - protein, 39 aa, Artificial Sequence
  Synthetic Construct
  MISC_FEATURE (2)..(2): Xaa at position 2 is Aib
  MISC_FEATURE (6)..(6): Xaa at position 6 is alpha-methyl-Phe(2F)
  MISC_FEATURE (10)..(10): Xaa at position 10 is 4Pal
  MISC_FEATURE (11)..(11): Xaa at position 11 is Aib
  MISC_FEATURE (13)..(13): Xaa at position 13 is alpha-methyl-Leu
  MISC_FEATURE (16)..(16): Xaa at position 16 is Orn
  MOD_RES (17)..(17): Lys at position 17 is chemically modified by conjugation of the epsilon-amino group of the Lys side chain with (2-[2-(2-amino-ethoxy)-ethoxy]-acetyl)3-(gamma-Glu)-CO-(CH2)10-CH 3
  MISC_FEATURE (20)..(20): Xaa at position 20 is Aib
  MISC_FEATURE (22)..(22): Xaa at position 22 is alpha-methyl-Phe
  MISC_FEATURE (24)..(24): Xaa at position 24 is D-Glu
  MISC_FEATURE (25)..(25): Xaa at position 25 is alpha-methyl-Tyr
  MOD_RES (28)..(28): Lys at position 28 is chemically modified by conjugation of the epsilon-amino group of the Lys side chain with (2-[2-(2-amino-ethoxy)-ethoxy]-acetyl)3-(gamma-Glu)-CO-(CH2)10-CH 3
  MOD_RES (39)..(39): Ser at position 39 is amidated
YXEGTXTSDXXIXLDXKAQXEXIXXLIKGGPSSGAPPPS

SEQ ID NO: 449 - protein, 40 aa, Artificial Sequence; identical to SEQ ID NO: 441
  Synthetic Construct
  MISC_FEATURE (2)..(2): Xaa at position 2 is Aib
  MISC_FEATURE (6)..(6): Xaa at position 6 is alpha-methyl-Phe(2F)
  MISC_FEATURE (10)..(10): Xaa at position 10 is 4Pal
  MISC_FEATURE (11)..(11): Xaa at position 11 is Aib
  MISC_FEATURE (13)..(13): Xaa at position 13 is alpha-methyl-Leu
  MISC_FEATURE (16)..(16): Xaa at position 16 is Orn
  MOD_RES (17)..(17): Lys at position 17 is chemically modified by conjugation of the epsilon-amino group of the Lys side chain with (2-[2-(2-amino-ethoxy)-ethoxy]-acetyl)3-(gamma-Glu)-CO-(CH2)10-CH 3
  MISC_FEATURE (20)..(20): Xaa at position 20 is Aib
  MISC_FEATURE (22)..(22): Xaa at position 22 is alpha-methyl-Phe
  MISC_FEATURE (24)..(24): Xaa at position 24 is D-Glu
  MISC_FEATURE (25)..(25): Xaa at position 25 is alpha-methyl-Tyr
  MOD_RES (40)..(40): Lys at position 40 is chemically modified by conjugation of the epsilon-amino group of the Lys side chain with (2-[2-(2-amino-ethoxy)-ethoxy]-acetyl)3-(gamma-Glu)-CO-(CH2)10-CH 3
  MOD_RES (40)..(40): Lys at position 40 is amidated

SEQ ID NO: 450 - protein, 39 aa, Artificial Sequence; identical to SEQ ID NO: 401
  Synthetic Construct
  MISC_FEATURE (2)..(2): Xaa at position 2 is Aib
  MISC_FEATURE (6)..(6): Xaa at position 6 is alpha-methyl-Phe(2F)
  MISC_FEATURE (10)..(10): Xaa at position 10 is 4Pal
  MISC_FEATURE (11)..(11): Xaa at position 11 is Aib
  MISC_FEATURE (13)..(13): Xaa at position 13 is alpha-methyl-Leu
  MISC_FEATURE (16)..(16): Xaa at position 16 is Orn
  MISC_FEATURE (20)..(20): Xaa at position 20 is Aib
  MISC_FEATURE (21)..(21): Xaa at position 21 is Orn
  MOD_RES (24)..(24): Lys at position 24 is chemically modified by conjugation of the epsilon-amino group of the Lys side chain with (2-[2-(2-amino-ethoxy)-ethoxy]-acetyl)2-(gamma-Glu)-(10-(4-carbox yphenoxy)decanoyl)
  MISC_FEATURE (25)..(25): Xaa at position 25 is alpha-methyl-Tyr
  MOD_RES (28)..(28): Lys at position 28 is chemically modified by conjugation of the epsilon-amino group of the Lys side chain with (2-[2-(2-amino-ethoxy)-ethoxy]-acetyl)2-(gamma-Glu)-(10-(4-carbox yphenoxy)decanoyl)
  MOD_RES (39)..(39): Ser at position 39 is amidated

SEQ ID NO: 451 - protein, 39 aa, Artificial Sequence
  Synthetic Construct
  MISC_FEATURE (2)..(2): Xaa at position 2 is Aib
  MISC_FEATURE (6)..(6): Xaa at position 6 is alpha-methyl-Phe(2F)
  MISC_FEATURE (10)..(10): Xaa at position 10 is 4Pal
  MISC_FEATURE (11)..(11): Xaa at position 11 is Aib
  MISC_FEATURE (13)..(13): Xaa at position 13 is alpha-methyl-Leu
  MISC_FEATURE (16)..(16): Xaa at position 16 is Orn
  MISC_FEATURE (20)..(20): Xaa at position 20 is Aib
  MISC_FEATURE (21)..(21): Xaa at position 21 is Orn
  MOD_RES (24)..(24): Lys at position 24 is chemically modified by conjugation of the epsilon-amino group of the Lys side chain with (2-[2-(2-amino-ethoxy)-ethoxy]-acetyl)2-(gamma-Glu)-CO-(CH2)12-CO 2H
  MISC_FEATURE (25)..(25): Xaa at position 25 is alpha-methyl-Tyr
  MOD_RES (28)..(28): Lys at position 28 is chemically modified by conjugation of the epsilon-amino group of the Lys side chain with (2-[2-(2-amino-ethoxy)-ethoxy]-acetyl)2-(gamma-Glu)-CO-(CH2)12-CO 2H
  MOD_RES (39)..(39): Ser at position 39 is amidated
YXEGTXTSDXXGXLDXQAQXXFIKXLIKGGPSSGAPPPS

SEQ ID NO: 452 - protein, 39 aa, Artificial Sequence; identical to SEQ ID NO: 401
  Synthetic Construct
  MISC_FEATURE (2)..(2): Xaa at position 2 is Aib
  MISC_FEATURE (6)..(6): Xaa at position 6 is alpha-methyl-Phe(2F)
  MISC_FEATURE (10)..(10): Xaa at position 10 is 4Pal
  MISC_FEATURE (11)..(11): Xaa at position 11 is Aib
  MISC_FEATURE (13)..(13): Xaa at position 13 is alpha-methyl-Leu
  MISC_FEATURE (16)..(16): Xaa at position 16 is Orn
  MISC_FEATURE (20)..(20): Xaa at position 20 is Aib
  MISC_FEATURE (21)..(21): Xaa at position 21 is Orn
  MOD_RES (24)..(24): Lys at position 24 is chemically modified by conjugation of the epsilon-amino group of the Lys side chain with (2-[2-(2-amino-ethoxy)-ethoxy]-acetyl)2-(gamma-Glu)-(11-(4-carbox yphenoxy)undecanoyl)
  MISC_FEATURE (25)..(25): Xaa at position 25 is alpha-methyl-Tyr
  MOD_RES (28)..(28): Lys at position 28 is chemically modified by conjugation of the epsilon-amino group of the Lys side chain with (2-[2-(2-amino-ethoxy)-ethoxy]-acetyl)2-(gamma-Glu)-(11-(4-carbox yphenoxy)undecanoyl)
  MOD_RES (39)..(39): Ser at position 39 is amidated

SEQ ID NO: 453 - protein, 39 aa, Artificial Sequence; identical to SEQ ID NO: 401
  Synthetic Construct
  MISC_FEATURE (2)..(2): Xaa at position 2 is Aib
  MISC_FEATURE (6)..(6): Xaa at position 6 is alpha-methyl-Phe(2F)
  MISC_FEATURE (10)..(10): Xaa at position 10 is 4Pal
  MISC_FEATURE (11)..(11): Xaa at position 11 is Aib
  MISC_FEATURE (13)..(13): Xaa at position 13 is alpha-methyl-Leu
  MISC_FEATURE (16)..(16): Xaa at position 16 is Orn
  MISC_FEATURE (20)..(20): Xaa at position 20 is Aib
  MISC_FEATURE (21)..(21): Xaa at position 21 is Orn
  MOD_RES (24)..(24): Lys at position 24 is chemically modified by conjugation of the epsilon-amino group of the Lys side chain with (2-[2-(2-amino-ethoxy)-ethoxy]-acetyl)2-(gamma-Glu)-CO-(CH2)14-CO 2H
  MISC_FEATURE (25)..(25): Xaa at position 25 is alpha-methyl-Tyr
  MOD_RES (28)..(28): Lys at position 28 is chemically modified by conjugation of the epsilon-amino group of the Lys side chain with (2-[2-(2-amino-ethoxy)-ethoxy]-acetyl)2-(gamma-Glu)-CO-(CH2)14-CO 2H
  MOD_RES (39)..(39): Ser at position 39 is amidated

SEQ ID NO: 454 - protein, 39 aa, Artificial Sequence; identical to SEQ ID NO: 401
  Synthetic Construct
  MISC_FEATURE (2)..(2): Xaa at position 2 is Aib
  MISC_FEATURE (6)..(6): Xaa at position 6 is alpha-methyl-Phe(2F)
  MISC_FEATURE (10)..(10): Xaa at position 10 is 4Pal
  MISC_FEATURE (11)..(11): Xaa at position 11 is Aib
  MISC_FEATURE (13)..(13): Xaa at position 13 is alpha-methyl-Leu
  MISC_FEATURE (16)..(16): Xaa at position 16 is Orn
  MISC_FEATURE (20)..(20): Xaa at position 20 is Aib
  MISC_FEATURE (21)..(21): Xaa at position 21 is 4Pal
  MOD_RES (24)..(24): Lys at position 24 is chemically modified by conjugation of the epsilon-amino group of the Lys side chain with (2-[2-(2-amino-ethoxy)-ethoxy]-acetyl)2-(gamma-Glu)-CO-(CH2)12-CO 2H
  MISC_FEATURE (25)..(25): Xaa at position 25 is alpha-methyl-Tyr
  MOD_RES (28)..(28): Lys at position 28 is chemically modified by conjugation of the epsilon-amino group of the Lys side chain with (2-[2-(2-amino-ethoxy)-ethoxy]-acetyl)2-(gamma-Glu)-CO-(CH2)12-CO 2H
  MOD_RES (39)..(39): Ser at position 39 is amidated

SEQ ID NO: 455 - protein, 39 aa, Artificial Sequence
  Synthetic Construct
  MISC_FEATURE (2)..(2): Xaa at position 2 is Aib
  MISC_FEATURE (6)..(6): Xaa at position 6 is alpha-methyl-Phe(2F)
  MOD_RES (10)..(10): Lys at position 10 is chemically modified by conjugation of the epsilon-amino group of the Lys side chain with (2-[2-(2-amino-ethoxy)-ethoxy]-acetyl)2-(gamma-Glu)-CO-(CH2)10-CH 3
  MISC_FEATURE (11)..(11): Xaa at position 11 is Aib
  MISC_FEATURE (13)..(13): Xaa at position 13 is alpha-methyl-Leu
  MOD_RES (17)..(17): Lys at position 17 is chemically modified by conjugation of the epsilon-amino group of the Lys side chain with (2-[2-(2-amino-ethoxy)-ethoxy]-acetyl)2-(gamma-Glu)-CO-(CH2)10-CH 3
  MISC_FEATURE (20)..(20): Xaa at position 20 is Aib
  MISC_FEATURE (24)..(24): Xaa at position 24 is D-Glu
  MISC_FEATURE (25)..(25): Xaa at position 25 is alpha-methyl-Tyr
  MOD_RES (39)..(39): Ser at position 39 is amidated
YXEGTXTSDKXIXLDGKAQXEFIXXLIEGGPSSGAPPPS

SEQ ID NO: 456 - protein, 39 aa, Artificial Sequence; identical to SEQ ID NO: 400
  Synthetic Construct
  MISC_FEATURE (2)..(2): Xaa at position 2 is Aib
  MISC_FEATURE (6)..(6): Xaa at position 6 is alpha-methyl-Phe(2F)
  MISC_FEATURE (11)..(11): Xaa at position 11 is Aib
  MISC_FEATURE (13)..(13): Xaa at position 13 is alpha-methyl-Leu
  MISC_FEATURE (16)..(16): Xaa at position 16 is Orn
  MISC_FEATURE (20)..(20): Xaa at position 20 is Aib
  MOD_RES (24)..(24): Lys at position 24 is chemically modified by conjugation of the epsilon-amino group of the Lys side chain with (2-[2-(2-amino-ethoxy)-ethoxy]-acetyl)2-(gamma-Glu)-(10-(4-carbox yphenoxy)decanoyl)
  MISC_FEATURE (25)..(25): Xaa at position 25 is alpha-methyl-Tyr
  MOD_RES (28)..(28): Lys at position 28 is chemically modified by conjugation of the epsilon-amino group of the Lys side chain with (2-[2-(2-amino-ethoxy)-ethoxy]-acetyl)2-(gamma-Glu)-(10-(4-carbox yphenoxy)decanoyl)
  MOD_RES (39)..(39): Ser at position 39 is amidated

SEQ ID NO: 457 - protein, 39 aa, Artificial Sequence
  Synthetic Construct
  MISC_FEATURE (2)..(2): Xaa at position 2 is Aib
  MISC_FEATURE (6)..(6): Xaa at position 6 is alpha-methyl-Phe(2F)
  MISC_FEATURE (11)..(11): Xaa at position 11 is Aib
  MISC_FEATURE (13)..(13): Xaa at position 13 is alpha-methyl-Leu
  MISC_FEATURE (16)..(16): Xaa at position 16 is Orn
  MISC_FEATURE (20)..(20): Xaa at position 20 is Aib
  MISC_FEATURE (21)..(21): Xaa at position 21 is Orn
  MOD_RES (24)..(24): Lys at position 24 is chemically modified by conjugation of the epsilon-amino group of the Lys side chain with (2-[2-(2-amino-ethoxy)-ethoxy]-acetyl)2-(gamma-Glu)-(10-(4-carbox yphenoxy)decanoyl)
  MISC_FEATURE (25)..(25): Xaa at position 25 is alpha-methyl-Tyr
  MOD_RES (28)..(28): Lys at position 28 is chemically modified by conjugation of the epsilon-amino group of the Lys side chain with (2-[2-(2-amino-ethoxy)-ethoxy]-acetyl)2-(gamma-Glu)-(10-(4-carbox yphenoxy)decanoyl)
  MOD_RES (39)..(39): Ser at position 39 is amidated
YXEGTXTSDVXIXLDXQAQXXFIKXLIKGGPSSGAPPPS

SEQ ID NO: 458 - protein, 39 aa, Artificial Sequence; identical to SEQ ID NO: 457
  Synthetic Construct
  MISC_FEATURE (2)..(2): Xaa at position 2 is Aib
  MISC_FEATURE (6)..(6): Xaa at position 6 is alpha-methyl-Phe(2F)
  MISC_FEATURE (11)..(11): Xaa at position 11 is Aib
  MISC_FEATURE (13)..(13): Xaa at position 13 is alpha-methyl-Leu
  MISC_FEATURE (16)..(16): Xaa at position 16 is Orn
  MISC_FEATURE (20)..(20): Xaa at position 20 is Aib
  MISC_FEATURE (21)..(21): Xaa at position 21 is Orn
  MOD_RES (24)..(24): Lys at position 24 is chemically modified by conjugation of the epsilon-amino group of the Lys side chain with (2-[2-(2-amino-ethoxy)-ethoxy]-acetyl)2-(gamma-Glu)-CO-(CH2)12-CO 2H
  MISC_FEATURE (25)..(25): Xaa at position 25 is alpha-methyl-Tyr
  MOD_RES (28)..(28): Lys at position 28 is chemically modified by conjugation of the epsilon-amino group of the Lys side chain with (2-[2-(2-amino-ethoxy)-ethoxy]-acetyl)2-(gamma-Glu)-CO-(CH2)12-CO 2H
  MOD_RES (39)..(39): Ser at position 39 is amidated

SEQ ID NO: 459 - protein, 39 aa, Artificial Sequence; identical to SEQ ID NO: 401
  Synthetic Construct
  MISC_FEATURE (2)..(2): Xaa at position 2 is Aib
  MISC_FEATURE (6)..(6): Xaa at position 6 is alpha-methyl-Phe(2F)
  MISC_FEATURE (10)..(10): Xaa at position 10 is 4Pal
  MISC_FEATURE (11)..(11): Xaa at position 11 is Aib
  MISC_FEATURE (13)..(13): Xaa at position 13 is alpha-methyl-Leu
  MISC_FEATURE (16)..(16): Xaa at position 16 is Orn
  MISC_FEATURE (20)..(20): Xaa at position 20 is Aib
  MISC_FEATURE (21)..(21): Xaa at position 21 is Orn
  MOD_RES (24)..(24): Lys at position 24 is chemically modified by conjugation of the epsilon-amino group of the Lys side chain with (2-[2-(2-amino-ethoxy)-ethoxy]-acetyl)-Ahx-(gamma-Glu)-CO-(CH2)12 -CO2H
  MISC_FEATURE (25)..(25): Xaa at position 25 is alpha-methyl-Tyr
  MOD_RES (28)..(28): Lys at position 28 is chemically modified by conjugation of the epsilon-amino group of the Lys side chain with (2-[2-(2-amino-ethoxy)-ethoxy]-acetyl)-Ahx-(gamma-Glu)-CO-(CH2)12 -CO2H
  MOD_RES (39)..(39): Ser at position 39 is amidated

SEQ ID NO: 460 - protein, 39 aa, Artificial Sequence; identical to SEQ ID NO: 401
  Synthetic Construct
  MISC_FEATURE (2)..(2): Xaa at position 2 is Aib
  MISC_FEATURE (6)..(6): Xaa at position 6 is alpha-methyl-Phe(2F)
  MISC_FEATURE (10)..(10): Xaa at position 10 is 4Pal
  MISC_FEATURE (11)..(11): Xaa at position 11 is Aib
  MISC_FEATURE (13)..(13): Xaa at position 13 is alpha-methyl-Leu
  MISC_FEATURE (16)..(16): Xaa at position 16 is Orn
  MISC_FEATURE (20)..(20): Xaa at position 20 is Aib
  MISC_FEATURE (21)..(21): Xaa at position 21 is Orn
  MOD_RES (24)..(24): Lys at position 24 is chemically modified by conjugation of the epsilon-amino group of the Lys side chain with (2-[2-(2-amino-ethoxy)-ethoxy]-acetyl)-Aoc-(gamma-Glu)-CO-(CH2)12 -CO2H
  MISC_FEATURE (25)..(25): Xaa at position 25 is alpha-methyl-Tyr
  MOD_RES (28)..(28): Lys at position 28 is chemically modified by conjugation of the epsilon-amino group of the Lys side chain with (2-[2-(2-amino-ethoxy)-ethoxy]-acetyl)-Aoc-(gamma-Glu)-CO-(CH2)12 -CO2H
  MOD_RES (39)..(39): Ser at position 39 is amidated

SEQ ID NO: 461 - protein, 39 aa, Artificial Sequence; identical to SEQ ID NO: 401
  Synthetic Construct
  MISC_FEATURE (2)..(2): Xaa at position 2 is Aib
  MISC_FEATURE (6)..(6): Xaa at position 6 is alpha-methyl-Phe(2F)
  MISC_FEATURE (10)..(10): Xaa at position 10 is 4Pal
  MISC_FEATURE (11)..(11): Xaa at position 11 is Aib
  MISC_FEATURE (13)..(13): Xaa at position 13 is alpha-methyl-Leu
  MISC_FEATURE (16)..(16): Xaa at position 16 is Orn
  MISC_FEATURE (20)..(20): Xaa at position 20 is Aib
  MISC_FEATURE (21)..(21): Xaa at position 21 is Orn
  MOD_RES (24)..(24): Lys at position 24 is chemically modified by conjugation of the epsilon-amino group of the Lys side chain with Ahx-(2-[2-(2-amino-ethoxy)-ethoxy]-acetyl)-(gamma-Glu)-CO-(CH2)12 -CO2H
  MISC_FEATURE (25)..(25): Xaa at position 25 is alpha-methyl-Tyr
  MOD_RES (28)..(28): Lys at position 28 is chemically modified by conjugation of the epsilon-amino group of the Lys side chain with Ahx-(2-[2-(2-amino-ethoxy)-ethoxy]-acetyl)-(gamma-Glu)-CO-(CH2)12 -CO2H
  MOD_RES (39)..(39): Ser at position 39 is amidated

SEQ ID NO: 462 - protein, 39 aa, Artificial Sequence; identical to SEQ ID NO: 401
  Synthetic Construct
  MISC_FEATURE (2)..(2): Xaa at position 2 is Aib
  MISC_FEATURE (6)..(6): Xaa at position 6 is alpha-methyl-Phe(2F)
  MISC_FEATURE (10)..(10): Xaa at position 10 is 4Pal
  MISC_FEATURE (11)..(11): Xaa at position 11 is Aib
  MISC_FEATURE (13)..(13): Xaa at position 13 is alpha-methyl-Leu
  MISC_FEATURE (16)..(16): Xaa at position 16 is Orn
  MISC_FEATURE (20)..(20): Xaa at position 20 is Aib
  MISC_FEATURE (21)..(21): Xaa at position 21 is Orn
  MOD_RES (24)..(24): Lys at position 24 is chemically modified by conjugation of the epsilon-amino group of the Lys side chain with Aoc-(2-[2-(2-amino-ethoxy)-ethoxy]-acetyl)-(gamma-Glu)-CO-(CH2)12 -CO2H
  MISC_FEATURE (25)..(25): Xaa at position 25 is alpha-methyl-Tyr
  MOD_RES (28)..(28): Lys at position 28 is chemically modified by conjugation of the epsilon-amino group of the Lys side chain with Aoc-(2-[2-(2-amino-ethoxy)-ethoxy]-acetyl)-(gamma-Glu)-CO-(CH2)12 -CO2H
  MOD_RES (39)..(39): Ser at position 39 is amidated

SEQ ID NO: 463 - protein, 39 aa, Artificial Sequence; identical to SEQ ID NO: 401
  Synthetic Construct
  MISC_FEATURE (2)..(2): Xaa at position 2 is Aib
  MISC_FEATURE (6)..(6): Xaa at position 6 is alpha-methyl-Phe(2F)
  MISC_FEATURE (10)..(10): Xaa at position 10 is 4Pal
  MISC_FEATURE (11)..(11): Xaa at position 11 is Aib
  MISC_FEATURE (13)..(13): Xaa at position 13 is alpha-methyl-Leu
  MISC_FEATURE (16)..(16): Xaa at position 16 is Orn
  MISC_FEATURE (20)..(20): Xaa at position 20 is Aib
  MISC_FEATURE (21)..(21): Xaa at position 21 is Orn
  MOD_RES (24)..(24): Lys at position 24 is chemically modified by conjugation of the epsilon-amino group of the Lys side chain with (2-[2-(2-amino-ethoxy)-ethoxy]-acetyl)-Ahx-(gamma-Glu)-(10-(4-car boxyphenoxy)decanoyl)
  MISC_FEATURE (25)..(25): Xaa at position 25 is alpha-methyl-Tyr
  MOD_RES (28)..(28): Lys at position 28 is chemically modified by conjugation of the epsilon-amino group of the Lys side chain with (2-[2-(2-amino-ethoxy)-ethoxy]-acetyl)-Ahx-(gamma-Glu)-(10-(4-car boxyphenoxy)decanoyl)
  MOD_RES (39)..(39): Ser at position 39 is amidated

SEQ ID NO: 464 - protein, 39 aa, Artificial Sequence; identical to SEQ ID NO: 401
  Synthetic Construct
  MISC_FEATURE (2)..(2): Xaa at position 2 is Aib
  MISC_FEATURE (6)..(6): Xaa at position 6 is alpha-methyl-Phe(2F)
  MISC_FEATURE (10)..(10): Xaa at position 10 is 4Pal
  MISC_FEATURE (11)..(11): Xaa at position 11 is Aib
  MISC_FEATURE (13)..(13): Xaa at position 13 is alpha-methyl-Leu
  MISC_FEATURE (16)..(16): Xaa at position 16 is Orn
  MISC_FEATURE (20)..(20): Xaa at position 20 is Aib
  MISC_FEATURE (21)..(21): Xaa at position 21 is Orn
  MOD_RES (24)..(24): Lys at position 24 is chemically modified by conjugation of the epsilon-amino group of the Lys side chain with (2-[2-(2-amino-ethoxy)-ethoxy]-acetyl)-Aoc-(gamma-Glu)-(10-(4-car boxyphenoxy)decanoyl)
  MISC_FEATURE (25)..(25): Xaa at position 25 is alpha-methyl-Tyr
  MOD_RES (28)..(28): Lys at position 28 is chemically modified by conjugation of the epsilon-amino group of the Lys side chain with (2-[2-(2-amino-ethoxy)-ethoxy]-acetyl)-Aoc-(gamma-Glu)-(10-(4-car boxyphenoxy)decanoyl)
  MOD_RES (39)..(39): Ser at position 39 is amidated

SEQ ID NO: 465 - protein, 39 aa, Artificial Sequence; identical to SEQ ID NO: 401
  Synthetic Construct
  MISC_FEATURE (2)..(2): Xaa at position 2 is Aib
  MISC_FEATURE (6)..(6): Xaa at position 6 is alpha-methyl-Phe(2F)
  MISC_FEATURE (10)..(10): Xaa at position 10 is 4Pal
  MISC_FEATURE (11)..(11): Xaa at position 11 is Aib
  MISC_FEATURE (13)..(13): Xaa at position 13 is alpha-methyl-Leu
  MISC_FEATURE (16)..(16): Xaa at position 16 is Orn
  MISC_FEATURE (20)..(20): Xaa at position 20 is Aib
  MISC_FEATURE (21)..(21): Xaa at position 21 is Orn
  MOD_RES (24)..(24): Lys at position 24 is chemically modified by conjugation of the epsilon-amino group of the Lys side chain with Ahx-(2-[2-(2-amino-ethoxy)-ethoxy]-acetyl)-(gamma-Glu)-(10-(4-car boxyphenoxy)decanoyl)
  MISC_FEATURE (25)..(25): Xaa at position 25 is alpha-methyl-Tyr
  MOD_RES (28)..(28): Lys at position 28 is chemically modified by conjugation of the epsilon-amino group of the Lys side chain with Ahx-(2-[2-(2-amino-ethoxy)-ethoxy]-acetyl)-(gamma-Glu)-(10-(4-car boxyphenoxy)decanoyl)
  MOD_RES (39)..(39): Ser at position 39 is amidated

SEQ ID NO: 466 - protein, 39 aa, Artificial Sequence; identical to SEQ ID NO: 401
  Synthetic Construct
  MISC_FEATURE (2)..(2): Xaa at position 2 is Aib
  MISC_FEATURE (6)..(6): Xaa at position 6 is alpha-methyl-Phe(2F)
  MISC_FEATURE (10)..(10): Xaa at position 10 is 4Pal
  MISC_FEATURE (11)..(11): Xaa at position 11 is Aib
  MISC_FEATURE (13)..(13): Xaa at position 13 is alpha-methyl-Leu
  MISC_FEATURE (16)..(16): Xaa at position 16 is Orn
  MISC_FEATURE (20)..(20): Xaa at position 20 is Aib
  MISC_FEATURE (21)..(21): Xaa at position 21 is Orn
  MOD_RES (24)..(24): Lys at position 24 is chemically modified by conjugation of the epsilon-amino group of the Lys side chain with Aoc-(2-[2-(2-amino-ethoxy)-ethoxy]-acetyl)-(gamma-Glu)-(10-(4-car boxyphenoxy)decanoyl)
  MISC_FEATURE (25)..(25): Xaa at position 25 is alpha-methyl-Tyr
  MOD_RES (28)..(28): Lys at position 28 is chemically modified by conjugation of the epsilon-amino group of the Lys side chain with Aoc-(2-[2-(2-amino-ethoxy)-ethoxy]-acetyl)-(gamma-Glu)-(10-(4-car boxyphenoxy)decanoyl)
  MOD_RES (39)..(39): Ser at position 39 is amidated

SEQ ID NO: 467 - protein, 39 aa, Artificial Sequence; identical to SEQ ID NO: 401
  Synthetic Construct
  MISC_FEATURE (2)..(2): Xaa at position 2 is Aib
  MISC_FEATURE (6)..(6): Xaa at position 6 is alpha-methyl-Phe(2F)
  MISC_FEATURE (10)..(10): Xaa at position 10 is 4Pal
  MISC_FEATURE (11)..(11): Xaa at position 11 is Aib
  MISC_FEATURE (13)..(13): Xaa at position 13 is alpha-methyl-Leu
  MISC_FEATURE (16)..(16): Xaa at position 16 is Orn
  MISC_FEATURE (20)..(20): Xaa at position 20 is Aib
  MISC_FEATURE (21)..(21): Xaa at position 21 is Orn
  MOD_RES (24)..(24): Lys at position 24 is chemically modified by conjugation of the epsilon-amino group of the Lys side chain with PEG4-(gamma-Glu)-CO-(CH2)12-CO2H
  MISC_FEATURE (25)..(25): Xaa at position 25 is alpha-methyl-Tyr
  MOD_RES (28)..(28): Lys at position 28 is chemically modified by conjugation of the epsilon-amino group of the Lys side chain with PEG4-(gamma-Glu)-CO-(CH2)12-CO2H
  MOD_RES (39)..(39): Ser at position 39 is amidated

SEQ ID NO: 468 - protein, 39 aa, Artificial Sequence; identical to SEQ ID NO: 401
  Synthetic Construct
  MISC_FEATURE (2)..(2): Xaa at position 2 is Aib
  MISC_FEATURE (6)..(6): Xaa at position 6 is alpha-methyl-Phe(2F)
  MISC_FEATURE (10)..(10): Xaa at position 10 is 4Pal
  MISC_FEATURE (11)..(11): Xaa at position 11 is Aib
  MISC_FEATURE (13)..(13): Xaa at position 13 is alpha-methyl-Leu
  MISC_FEATURE (16)..(16): Xaa at position 16 is Orn
  MISC_FEATURE (20)..(20): Xaa at position 20 is Aib
  MISC_FEATURE (21)..(21): Xaa at position 21 is Orn
  MOD_RES (24)..(24): Lys at position 24 is chemically modified by conjugation of the epsilon-amino group of the Lys side chain with PEG3-(gamma-Glu)-CO-(CH2)12-CO2H
  MISC_FEATURE (25)..(25): Xaa at position 25 is alpha-methyl-Tyr
  MOD_RES (28)..(28): Lys at position 28 is chemically modified by conjugation of the epsilon-amino group of the Lys side chain with PEG3-(gamma-Glu)-CO-(CH2)12-CO2H
  MOD_RES (39)..(39): Ser at position 39 is amidated

SEQ ID NO: 469 - protein, 39 aa, Artificial Sequence; identical to SEQ ID NO: 401
  Synthetic Construct
  MISC_FEATURE (2)..(2): Xaa at position 2 is Aib
  MISC_FEATURE (6)..(6): Xaa at position 6 is alpha-methyl-Phe(2F)
  MISC_FEATURE (10)..(10): Xaa at position 10 is 4Pal
  MISC_FEATURE (11)..(11): Xaa at position 11 is Aib
  MISC_FEATURE (13)..(13): Xaa at position 13 is alpha-methyl-Leu
  MISC_FEATURE (16)..(16): Xaa at position 16 is Orn
  MISC_FEATURE (20)..(20): Xaa at position 20 is Aib
  MISC_FEATURE (21)..(21): Xaa at position 21 is Orn
  MOD_RES (24)..(24): Lys at position 24 is chemically modified by conjugation of the epsilon-amino group of the Lys side chain with (2-[2-(2-amino-ethoxy)-ethoxy]-acetyl)-(gamma-Glu)-CO-(CH2)12-CO2 H
  MISC_FEATURE (25)..(25): Xaa at position 25 is alpha-methyl-Tyr
  MOD_RES (28)..(28): Lys at position 28 is chemically modified by conjugation of the epsilon-amino group of the Lys side chain with (2-[2-(2-amino-ethoxy)-ethoxy]-acetyl)-(gamma-Glu)-CO-(CH2)12-CO2 H
  MOD_RES (39)..(39): Ser at position 39 is amidated

SEQ ID NO: 470 - protein, 39 aa, Artificial Sequence; identical to SEQ ID NO: 413
  Synthetic Construct
  MISC_FEATURE (2)..(2): Xaa at position 2 is Aib
  MISC_FEATURE (6)..(6): Xaa at position 6 is alpha-methyl-Phe(2F)
  MISC_FEATURE (10)..(10): Xaa at position 10 is 4Pal
  MISC_FEATURE (11)..(11): Xaa at position 11 is Aib
  MISC_FEATURE (13)..(13): Xaa at position 13 is alpha-methyl-Leu
  MISC_FEATURE (16)..(16): Xaa at position 16 is Orn
  MISC_FEATURE (20)..(20): Xaa at position 20 is Aib
  MOD_RES (24)..(24): Lys at position 24 is chemically modified by conjugation of the epsilon-amino group of the Lys side chain with (2-[2-(2-amino-ethoxy)-ethoxy]-acetyl)3-(gamma-Glu)-CO-(CH2)12-CO 2H
  MISC_FEATURE (25)..(25): Xaa at position 25 is alpha-methyl-Tyr
  MOD_RES (28)..(28): Lys at position 28 is chemically modified by conjugation of the epsilon-amino group of the Lys side chain with (2-[2-(2-amino-ethoxy)-ethoxy]-acetyl)3-(gamma-Glu)-CO-(CH2)12-CO 2H
  MOD_RES (39)..(39): Ser at position 39 is amidated

SEQ ID NO: 471 - protein, 39 aa, Artificial Sequence; identical to SEQ ID NO: 401
  Synthetic Construct
  MISC_FEATURE (2)..(2): Xaa at position 2 is Aib
  MISC_FEATURE (6)..(6): Xaa at position 6 is alpha-methyl-Phe(2F)
  MISC_FEATURE (10)..(10): Xaa at position 10 is 4Pal
  MISC_FEATURE (11)..(11): Xaa at position 11 is Aib
  MISC_FEATURE (13)..(13): Xaa at position 13 is alpha-methyl-Leu
  MISC_FEATURE (16)..(16): Xaa at position 16 is Orn
  MISC_FEATURE (20)..(20): Xaa at position 20 is Aib
  MISC_FEATURE (21)..(21): Xaa at position 21 is Orn
  MOD_RES (24)..(24): Lys at position 24 is chemically modified by conjugation of the epsilon-amino group of the Lys side chain with (PEG4-(gamma-Glu)-(10-(4-carboxyphenoxy)decanoyl)
  MISC_FEATURE (25)..(25): Xaa at position 25 is alpha-methyl-Tyr
  MOD_RES (28)..(28): Lys at position 28 is chemically modified by conjugation of the epsilon-amino group of the Lys side chain with (PEG4-(gamma-Glu)-(10-(4-carboxyphenoxy)decanoyl)
  MOD_RES (39)..(39): Ser at position 39 is amidated

SEQ ID NO: 472 - protein, 39 aa, Artificial Sequence; identical to SEQ ID NO: 401
  Synthetic Construct
  MISC_FEATURE (2)..(2): Xaa at position 2 is Aib
  MISC_FEATURE (6)..(6): Xaa at position 6 is alpha-methyl-Phe(2F)
  MISC_FEATURE (10)..(10): Xaa at position 10 is 4Pal
  MISC_FEATURE (11)..(11): Xaa at position 11 is Aib
  MISC_FEATURE (13)..(13): Xaa at position 13 is alpha-methyl-Leu
  MISC_FEATURE (16)..(16): Xaa at position 16 is Orn
  MISC_FEATURE (20)..(20): Xaa at position 20 is Aib
  MISC_FEATURE (21)..(21): Xaa at position 21 is Orn
  MOD_RES (24)..(24): Lys at position 24 is chemically modified by conjugation of the epsilon-amino group of the Lys side chain with PEG3-(gamma-Glu)-(10-(4-carboxyphenoxy)decanoyl)
  MISC_FEATURE (25)..(25): Xaa at position 25 is alpha-methyl-Tyr
  MOD_RES (28)..(28): Lys at position 28 is chemically modified by conjugation of the epsilon-amino group of the Lys side chain with PEG3-(gamma-Glu)-(10-(4-carboxyphenoxy)decanoyl)
  MOD_RES (39)..(39): Ser at position 39 is amidated

SEQ ID NO: 473 - protein, 39 aa, Artificial Sequence; identical to SEQ ID NO: 401
  Synthetic Construct
  MISC_FEATURE (2)..(2): Xaa at position 2 is Aib
  MISC_FEATURE (6)..(6): Xaa at position 6 is alpha-methyl-Phe(2F)
  MISC_FEATURE (10)..(10): Xaa at position 10 is 4Pal
  MISC_FEATURE (11)..(11): Xaa at position 11 is Aib
  MISC_FEATURE (13)..(13): Xaa at position 13 is alpha-methyl-Leu
  MISC_FEATURE (16)..(16): Xaa at position 16 is Orn
  MISC_FEATURE (20)..(20): Xaa at position 20 is Aib
  MISC_FEATURE (21)..(21): Xaa at position 21 is Orn
  MOD_RES (24)..(24): Lys at position 24 is chemically modified by conjugation of the epsilon-amino group of the Lys side chain with (2-[2-(2-amino-ethoxy)-ethoxy]-acetyl)-(gamma-Glu)-(10-(4-carboxy phenoxy)decanoyl)
  MISC_FEATURE (25)..(25): Xaa at position 25 is alpha-methyl-Tyr
  MOD_RES (28)..(28): Lys at position 28 is chemically modified by conjugation of the epsilon-amino group of the Lys side chain with (2-[2-(2-amino-ethoxy)-ethoxy]-acetyl)-(gamma-Glu)-(10-(4-carboxy phenoxy)decanoyl)
  MOD_RES (39)..(39): Ser at position 39 is amidated

SEQ ID NO: 474 - protein, 39 aa, Artificial Sequence; identical to SEQ ID NO: 413
  Synthetic Construct
  MISC_FEATURE (2)..(2): Xaa at position 2 is Aib
  MISC_FEATURE (6)..(6): Xaa at position 6 is alpha-methyl-Phe(2F)
  MISC_FEATURE (10)..(10): Xaa at position 10 is 4Pal
  MISC_FEATURE (11)..(11): Xaa at position 11 is Aib
  MISC_FEATURE (13)..(13): Xaa at position 13 is alpha-methyl-Leu
  MISC_FEATURE (16)..(16): Xaa at position 16 is Orn
  MISC_FEATURE (20)..(20): Xaa at position 20 is Aib
  MOD_RES (24)..(24): Lys at position 24 is chemically modified by conjugation of the epsilon-amino group of the Lys side chain with (2-[2-(2-amino-ethoxy)-ethoxy]-acetyl)3-(gamma-Glu)-(10-(4-carbox yphenoxy)decanoyl)
  MISC_FEATURE (25)..(25): Xaa at position 25 is alpha-methyl-Tyr
  MOD_RES (28)..(28): Lys at position 28 is chemically modified by conjugation of the epsilon-amino group of the Lys side chain with (2-[2-(2-amino-ethoxy)-ethoxy]-acetyl)3-(gamma-Glu)-(10-(4-carbox yphenoxy)decanoyl)
  MOD_RES (39)..(39): Ser at position 39 is amidated

SEQ ID NO: 475 - protein, 39 aa, Artificial Sequence; identical to SEQ ID NO: 254
  Synthetic Construct
  MISC_FEATURE (2)..(2): Xaa at position 2 is Aib
  MISC_FEATURE (6)..(6): Xaa at position 6 is alpha-methyl-Phe(2F)
  MISC_FEATURE (10)..(10): Xaa at position 10 is 4Pal
  MISC_FEATURE (11)..(11): Xaa at position 11 is Aib
  MISC_FEATURE (13)..(13): Xaa at position 13 is alpha-methyl-Leu
  MISC_FEATURE (16)..(16): Xaa at position 16 is Orn
  MOD_RES (17)..(17): Lys at position 17 is chemically modified by conjugation of the epsilon-amino group of the Lys side chain with (2-[2-(2-amino-ethoxy)-ethoxy]-acetyl)-Aoc-CO-(CH2)12-CO2H
  MISC_FEATURE (20)..(20): Xaa at position 20 is Aib
  MISC_FEATURE (24)..(24): Xaa at position 24 is D-Glu
  MISC_FEATURE (25)..(25): Xaa at position 25 is alpha-methyl-Tyr
  MOD_RES (28)..(28): Lys at position 28 is chemically modified by conjugation of the epsilon-amino group of the Lys side chain with (2-[2-(2-amino-ethoxy)-ethoxy]-acetyl)-Aoc-CO-(CH2)12-CO2H
  MOD_RES (39)..(39): Ser at position 39 is amidated

SEQ ID NO: 476 - protein, 39 aa, Artificial Sequence; identical to SEQ ID NO: 401
  Synthetic Construct
  MISC_FEATURE (2)..(2): Xaa at position 2 is Aib
  MISC_FEATURE (6)..(6): Xaa at position 6 is alpha-methyl-Phe(2F)
  MISC_FEATURE (10)..(10): Xaa at position 10 is 4Pal
  MISC_FEATURE (11)..(11): Xaa at position 11 is Aib
  MISC_FEATURE (13)..(13): Xaa at position 13 is alpha-methyl-Leu
  MISC_FEATURE (16)..(16): Xaa at position 16 is Orn
  MISC_FEATURE (20)..(20): Xaa at position 20 is Aib
  MISC_FEATURE (21)..(21): Xaa at position 21 is Orn
  MOD_RES (24)..(24): Lys at position 24 is chemically modified by conjugation of the epsilon-amino group of the Lys side chain with PEG6-(gamma-Glu)-CO-(CH2)12-CO2H
  MISC_FEATURE (25)..(25): Xaa at position 25 is alpha-methyl-Tyr
  MOD_RES (28)..(28): Lys at position 28 is chemically modified by conjugation of the epsilon-amino group of the Lys side chain with PEG6-(gamma-Glu)-CO-(CH2)12-CO2H
  MOD_RES (39)..(39): Ser at position 39 is amidated

SEQ ID NO: 477 - protein, 39 aa, Artificial Sequence; identical to SEQ ID NO: 401
  Synthetic Construct
  MISC_FEATURE (2)..(2): Xaa at position 2 is Aib
  MISC_FEATURE (6)..(6): Xaa at position 6 is alpha-methyl-Phe(2F)
  MISC_FEATURE (10)..(10): Xaa at position 10 is 4Pal
  MISC_FEATURE (11)..(11): Xaa at position 11 is Aib
  MISC_FEATURE (13)..(13): Xaa at position 13 is alpha-methyl-Leu
  MISC_FEATURE (16)..(16): Xaa at position 16 is Orn
  MISC_FEATURE (20)..(20): Xaa at position 20 is Aib
  MISC_FEATURE (21)..(21): Xaa at position 21 is Orn
  MOD_RES (24)..(24): Lys at position 24 is chemically modified by conjugation of the epsilon-amino group of the Lys side chain with PEG5-(gamma-Glu)-CO-(CH2)12-CO2H
  MISC_FEATURE (25)..(25): Xaa at position 25 is alpha-methyl-Tyr
  MOD_RES (28)..(28): Lys at position 28 is chemically modified by conjugation of the epsilon-amino group of the Lys side chain with PEG5-(gamma-Glu)-CO-(CH2)12-CO2H
  MOD_RES (39)..(39): Ser at position 39 is amidated

SEQ ID NO: 478 - protein, 39 aa, Artificial Sequence; identical to SEQ ID NO: 401
  Synthetic Construct
  MISC_FEATURE (2)..(2): Xaa at position 2 is Aib
  MISC_FEATURE (6)..(6): Xaa at position 6 is alpha-methyl-Phe(2F)
  MISC_FEATURE (10)..(10): Xaa at position 10 is 4Pal
  MISC_FEATURE (11)..(11): Xaa at position 11 is Aib
  MISC_FEATURE (13)..(13): Xaa at position 13 is alpha-methyl-Leu
  MISC_FEATURE (16)..(16): Xaa at position 16 is Orn
  MISC_FEATURE (20)..(20): Xaa at position 20 is Aib
  MISC_FEATURE (21)..(21): Xaa at position 21 is Orn
  MOD_RES (24)..(24): Lys at position 24 is chemically modified by conjugation of the epsilon-amino group of the Lys side chain with PEG6-(gamma-Glu)-(10-(4-carboxyphenoxy)decanoyl)
  MISC_FEATURE (25)..(25): Xaa at position 25 is alpha-methyl-Tyr
  MOD_RES (28)..(28): Lys at position 28 is chemically modified by conjugation of the epsilon-amino group of the Lys side chain with PEG6-(gamma-Glu)-(10-(4-carboxyphenoxy)decanoyl)
  MOD_RES (39)..(39): Ser at position 39 is amidated

SEQ ID NO: 479 - protein, 39 aa, Artificial Sequence; identical to SEQ ID NO: 401
  Synthetic Construct
  MISC_FEATURE (2)..(2): Xaa at position 2 is Aib
  MISC_FEATURE (6)..(6): Xaa at position 6 is alpha-methyl-Phe(2F)
  MISC_FEATURE (10)..(10): Xaa at position 10 is 4Pal
  MISC_FEATURE (11)..(11): Xaa at position 11 is Aib
  MISC_FEATURE (13)..(13): Xaa at position 13 is alpha-methyl-Leu
  MISC_FEATURE (16)..(16): Xaa at position 16 is Orn
  MISC_FEATURE (20)..(20): Xaa at position 20 is Aib
  MISC_FEATURE (21)..(21): Xaa at position 21 is Orn
  MOD_RES (24)..(24): Lys at position 24 is chemically modified by conjugation of the epsilon-amino group of the Lys side chain with PEG5-(gamma-Glu)-(10-(4-carboxyphenoxy)decanoyl)
  MISC_FEATURE (25)..(25): Xaa at position 25 is alpha-methyl-Tyr
  MOD_RES (28)..(28): Lys at position 28 is chemically modified by conjugation of the epsilon-amino group of the Lys side chain with PEG5-(gamma-Glu)-(10-(4-carboxyphenoxy)decanoyl)
  MOD_RES (39)..(39): Ser at position 39 is amidated

SEQ ID NO: 480 - protein, 39 aa, Artificial Sequence; identical to SEQ ID NO: 401
  Synthetic Construct
  MISC_FEATURE (2)..(2): Xaa at position 2 is Aib
  MISC_FEATURE (6)..(6): Xaa at position 6 is alpha-methyl-Phe(2F)
  MISC_FEATURE (10)..(10): Xaa at position 10 is 4Pal
  MISC_FEATURE (11)..(11): Xaa at position 11 is Aib
  MISC_FEATURE (13)..(13): Xaa at position 13 is alpha-methyl-Leu
  MISC_FEATURE (16)..(16): Xaa at position 16 is Orn
  MISC_FEATURE (20)..(20): Xaa at position 20 is Aib
  MISC_FEATURE (21)..(21): Xaa at position 21 is Orn
  MOD_RES (24)..(24): Lys at position 24 is chemically modified by conjugation of the epsilon-amino group of the Lys side chain with (2-[2-(2-amino-ethoxy)-ethoxy]-acetyl)2-Trx-(gamma-Glu)-CO-(CH2)1 2-CO2H
  MISC_FEATURE (25)..(25): Xaa at position 25 is alpha-methyl-Tyr
  MOD_RES (28)..(28): Lys at position 28 is chemically modified by conjugation of the epsilon-amino group of the Lys side chain with (2-[2-(2-amino-ethoxy)-ethoxy]-acetyl)2-Trx-(gamma-Glu)-CO-(CH2)1 2-CO2H
  MOD_RES (39)..(39): Ser at position 39 is amidated

SEQ ID NO: 481 - protein, 39 aa, Artificial Sequence; identical to SEQ ID NO: 401
  Synthetic Construct
  MISC_FEATURE (2)..(2): Xaa at position 2 is Aib
  MISC_FEATURE (6)..(6): Xaa at position 6 is alpha-methyl-Phe(2F)
  MISC_FEATURE (10)..(10): Xaa at position 10 is 4Pal
  MISC_FEATURE (11)..(11): Xaa at position 11 is Aib
  MISC_FEATURE (13)..(13): Xaa at position 13 is alpha-methyl-Leu
  MISC_FEATURE (16)..(16): Xaa at position 16 is Orn
  MISC_FEATURE (20)..(20): Xaa at position 20 is Aib
  MISC_FEATURE (21)..(21): Xaa at position 21 is Orn
  MOD_RES (24)..(24): Lys at position 24 is chemically modified by conjugation of the epsilon-amino group of the Lys side chain with (2-[2-(2-amino-ethoxy)-ethoxy]-acetyl)2-Trx-(gamma-Glu)-(10-(4-ca rboxyphenoxy)decanoyl)
  MISC_FEATURE (25)..(25): Xaa at position 25 is alpha-methyl-Tyr
  MOD_RES (28)..(28): Lys at position 28 is chemically modified by conjugation of the epsilon-amino group of the Lys side chain with (2-[2-(2-amino-ethoxy)-ethoxy]-acetyl)2-Trx-(gamma-Glu)-(10-(4-ca rboxyphenoxy)decanoyl)
  MOD_RES (39)..(39): Ser at position 39 is amidated

SEQ ID NO: 482 - protein, 39 aa, Artificial Sequence; identical to SEQ ID NO: 401
  Synthetic Construct
  MISC_FEATURE (2)..(2): Xaa at position 2 is Aib
  MISC_FEATURE (6)..(6): Xaa at position 6 is alpha-methyl-Phe(2F)
  MISC_FEATURE (10)..(10): Xaa at position 10 is 4Pal
  MISC_FEATURE (11)..(11): Xaa at position 11 is Aib
  MISC_FEATURE (13)..(13): Xaa at position 13 is alpha-methyl-Leu
  MISC_FEATURE (16)..(16): Xaa at position 16 is Orn
  MISC_FEATURE (20)..(20): Xaa at position 20 is Aib
  MISC_FEATURE (21)..(21): Xaa at position 21 is Orn
  MOD_RES (24)..(24): Lys at position 24 is chemically modified by conjugation of the epsilon-amino group of the Lys side chain with (2-[2-(2-amino-ethoxy)-ethoxy]-acetyl)-Trx-(gamma-Glu)-CO-(CH2)12 -CO2H
  MISC_FEATURE (25)..(25): Xaa at position 25 is alpha-methyl-Tyr
  MOD_RES (28)..(28): Lys at position 28 is chemically modified by conjugation of the epsilon-amino group of the Lys side chain with (2-[2-(2-amino-ethoxy)-ethoxy]-acetyl)-Trx-(gamma-Glu)-CO-(CH2)12 -CO2H
  MOD_RES (39)..(39): Ser at position 39 is amidated

SEQ ID NO: 483 - protein, 39 aa, Artificial Sequence; identical to SEQ ID NO: 401
  Synthetic Construct
  MISC_FEATURE (2)..(2): Xaa at position 2 is Aib
  MISC_FEATURE (6)..(6): Xaa at position 6 is alpha-methyl-Phe(2F)
  MISC_FEATURE (10)..(10): Xaa at position 10 is 4Pal
  MISC_FEATURE (11)..(11): Xaa at position 11 is Aib
  MISC_FEATURE (13)..(13): Xaa at position 13 is alpha-methyl-Leu
  MISC_FEATURE (16)..(16): Xaa at position 16 is Orn
  MISC_FEATURE (20)..(20): Xaa at position 20 is Aib
  MISC_FEATURE (21)..(21): Xaa at position 21 is Orn
  MOD_RES (24)..(24): Lys at position 24 is chemically modified by conjugation of the epsilon-amino group of the Lys side chain with (2-[2-(2-amino-ethoxy)-ethoxy]-acetyl)-Trx-(gamma-Glu)-(10-(4-car boxyphenoxy)decanoyl)
  MISC_FEATURE (25)..(25): Xaa at position 25 is alpha-methyl-Tyr
  MOD_RES (28)..(28): Lys at position 28 is chemically modified by conjugation of the epsilon-amino group of the Lys side chain with (2-[2-(2-amino-ethoxy)-ethoxy]-acetyl)-Trx-(gamma-Glu)-(10-(4-car boxyphenoxy)decanoyl)
  MOD_RES (39)..(39): Ser at position 39 is amidated

SEQ ID NO: 484 - protein, 39 aa, Artificial Sequence; identical to SEQ ID NO: 401
  Synthetic Construct
  MISC_FEATURE (2)..(2): Xaa at position 2 is Aib
  MISC_FEATURE (6)..(6): Xaa at position 6 is alpha-methyl-Phe(2F)
  MISC_FEATURE (10)..(10): Xaa at position 10 is 4Pal
  MISC_FEATURE (11)..(11): Xaa at position 11 is Aib
  MISC_FEATURE (13)..(13): Xaa at position 13 is alpha-methyl-Leu
  MISC_FEATURE (16)..(16): Xaa at position 16 is Orn
  MISC_FEATURE (20)..(20): Xaa at position 20 is Aib
  MISC_FEATURE (21)..(21): Xaa at position 21 is Orn
  MOD_RES (24)..(24): Lys at position 24 is chemically modified by conjugation of the epsilon-amino group of the Lys side chain with (2-[2-(2-amino-ethoxy)-ethoxy]-acetyl)2-(gamma-Glu)2-CO-(CH2)12-C O2H
  MISC_FEATURE (25)..(25): Xaa at position 25 is alpha-methyl-Tyr
  MOD_RES (28)..(28): Lys at position 28 is chemically modified by conjugation of the epsilon-amino group of the Lys side chain with (2-[2-(2-amino-ethoxy)-ethoxy]-acetyl)2-(gamma-Glu)2-CO-(CH2)12-C O2H
  MOD_RES (39)..(39): Ser at position 39 is amidated

SEQ ID NO: 485 - protein, 39 aa, Artificial Sequence; identical to SEQ ID NO: 401
  Synthetic Construct
  MISC_FEATURE (2)..(2): Xaa at position 2 is Aib
  MISC_FEATURE (6)..(6): Xaa at position 6 is alpha-methyl-Phe(2F)
  MISC_FEATURE (10)..(10): Xaa at position 10 is 4Pal
  MISC_FEATURE (11)..(11): Xaa at position 11 is Aib
  MISC_FEATURE (13)..(13): Xaa at position 13 is alpha-methyl-Leu
  MISC_FEATURE (16)..(16): Xaa at position 16 is Orn
  MISC_FEATURE (20)..(20): Xaa at position 20 is Aib
  MISC_FEATURE (21)..(21): Xaa at position 21 is Orn
  MOD_RES (24)..(24): Lys at position 24 is chemically modified by conjugation of the epsilon-amino group of the Lys side chain with (2-[2-(2-amino-ethoxy)-ethoxy]-acetyl)2-(gamma-Glu)2-(10-(4-carbo xyphenoxy)decanoyl)
  MISC_FEATURE (25)..(25): Xaa at position 25 is alpha-methyl-Tyr
  MOD_RES (28)..(28): Lys at position 28 is chemically modified by conjugation of the epsilon-amino group of the Lys side chain with (2-[2-(2-amino-ethoxy)-ethoxy]-acetyl)2-(gamma-Glu)2-(10-(4-carbo xyphenoxy)decanoyl)
  MOD_RES (39)..(39): Ser at position 39 is amidated

SEQ ID NO: 486 - protein, 39 aa, Artificial Sequence; identical to SEQ ID NO: 401
  Synthetic Construct
  MISC_FEATURE (2)..(2): Xaa at position 2 is Aib
  MISC_FEATURE (6)..(6): Xaa at position 6 is alpha-methyl-Phe(2F)
  MISC_FEATURE (10)..(10): Xaa at position 10 is 4Pal
  MISC_FEATURE (11)..(11): Xaa at position 11 is Aib
  MISC_FEATURE (13)..(13): Xaa at position 13 is alpha-methyl-Leu
  MISC_FEATURE (16)..(16): Xaa at position 16 is Orn
  MISC_FEATURE (20)..(20): Xaa at position 20 is Aib
  MISC_FEATURE (21)..(21): Xaa at position 21 is Orn
  MOD_RES (24)..(24): Lys at position 24 is chemically modified by conjugation of the epsilon-amino group of the Lys side chain with (2-[2-(2-amino-ethoxy)-ethoxy]-acetyl)3-(gamma-Glu)-CO-(CH2)12-CO 2H
  MISC_FEATURE (25)..(25): Xaa at position 25 is alpha-methyl-Tyr
  MOD_RES (28)..(28): Lys at position 28 is chemically modified by conjugation of the epsilon-amino group of the Lys side chain with (2-[2-(2-amino-ethoxy)-ethoxy]-acetyl)3-(gamma-Glu)-CO-(CH2)12-CO 2H
  MOD_RES (39)..(39): Ser at position 39 is amidated

SEQ ID NO: 487 - protein, 39 aa, Artificial Sequence; identical to SEQ ID NO: 401
  Synthetic Construct
  MISC_FEATURE (2)..(2): Xaa at position 2 is Aib
  MISC_FEATURE (6)..(6): Xaa at position 6 is alpha-methyl-Phe(2F)
  MISC_FEATURE (10)..(10): Xaa at position 10 is 4Pal
  MISC_FEATURE (11)..(11): Xaa at position 11 is Aib
  MISC_FEATURE (13)..(13): Xaa at position 13 is alpha-methyl-Leu
  MISC_FEATURE (16)..(16): Xaa at position 16 is Orn
  MISC_FEATURE (20)..(20): Xaa at position 20 is Aib
  MISC_FEATURE (21)..(21): Xaa at position 21 is Orn
  MOD_RES (24)..(24): Lys at position 24 is chemically modified by conjugation of the epsilon-amino group of the Lys side chain with (2-[2-(2-amino-ethoxy)-ethoxy]-acetyl)3-(gamma-Glu)-(10-(4-carbox yphenoxy)decanoyl)
  MISC_FEATURE (25)..(25): Xaa at position 25 is alpha-methyl-Tyr
  MOD_RES (28)..(28): Lys at position 28 is chemically modified by conjugation of the epsilon-amino group of the Lys side chain with (2-[2-(2-amino-ethoxy)-ethoxy]-acetyl)3-(gamma-Glu)-(10-(4-carbox yphenoxy)decanoyl)
  MOD_RES (39)..(39): Ser at position 39 is amidated

SEQ ID NO: 488 - protein, 39 aa, Artificial Sequence; identical to SEQ ID NO: 326
  Synthetic Construct
  MISC_FEATURE (2)..(2): Xaa at position 2 is Aib
  MISC_FEATURE (6)..(6): Xaa at position 6 is alpha-methyl-Phe(2F)
  MISC_FEATURE (11)..(11): Xaa at position 11 is Aib
  MISC_FEATURE (13)..(13): Xaa at position 13 is alpha-methyl-Leu
  MISC_FEATURE (16)..(16): Xaa at position 16 is Orn
  MISC_FEATURE (20)..(20): Xaa at position 20 is Aib
  MISC_FEATURE (21)..(21): Xaa at position 21 is Orn
  MOD_RES (24)..(24): Lys at position 24 is chemically modified by conjugation of the epsilon-amino group of the Lys side chain with (2-[2-(2-amino-ethoxy)-ethoxy]-acetyl)3-(gamma-Glu)-CO-(CH2)12-CO 2H
  MISC_FEATURE (25)..(25): Xaa at position 25 is alpha-methyl-Tyr
  MOD_RES (28)..(28): Lys at position 28 is chemically modified by conjugation of the epsilon-amino group of the Lys side chain with (2-[2-(2-amino-ethoxy)-ethoxy]-acetyl)3-(gamma-Glu)-CO-(CH2)12-CO 2H
  MOD_RES (39)..(39): Ser at position 39 is amidated

SEQ ID NO: 489 - protein, 39 aa, Artificial Sequence; identical to SEQ ID NO: 411
  Synthetic Construct
  MISC_FEATURE (2)..(2): Xaa at position 2 is Aib
  MISC_FEATURE (6)..(6): Xaa at position 6 is alpha-methyl-Phe(2F)
  MISC_FEATURE (11)..(11): Xaa at position 11 is Aib
  MISC_FEATURE (13)..(13): Xaa at position 13 is alpha-methyl-Leu
  MISC_FEATURE (16)..(16): Xaa at position 16 is Orn
  MISC_FEATURE (20)..(20): Xaa at position 20 is Aib
  MISC_FEATURE (21)..(21): Xaa at position 21 is Orn
  MOD_RES (24)..(24): Lys at position 24 is chemically modified by conjugation of the epsilon-amino group of the Lys side chain with (2-[2-(2-amino-ethoxy)-ethoxy]-acetyl)3-(gamma-Glu)-CO-(CH2)12-CO 2H
  MISC_FEATURE (25)..(25): Xaa at position 25 is alpha-methyl-Tyr
  MOD_RES (28)..(28): Lys at position 28 is chemically modified by conjugation of the epsilon-amino group of the Lys side chain with (2-[2-(2-amino-ethoxy)-ethoxy]-acetyl)3-(gamma-Glu)-CO-(CH2)12-CO 2H
  MOD_RES (39)..(39): Ser at position 39 is amidated

SEQ ID NO: 490 - protein, 39 aa, Artificial Sequence; identical to SEQ ID NO: 411
  Synthetic Construct
  MISC_FEATURE (2)..(2): Xaa at position 2 is Aib
  MISC_FEATURE (6)..(6): Xaa at position 6 is alpha-methyl-Phe(2F)
  MISC_FEATURE (11)..(11): Xaa at position 11 is Aib
  MISC_FEATURE (13)..(13): Xaa at position 13 is alpha-methyl-Leu
  MISC_FEATURE (16)..(16): Xaa at position 16 is Orn
  MISC_FEATURE (20)..(20): Xaa at position 20 is Aib
  MISC_FEATURE (21)..(21): Xaa at position 21 is Orn
  MOD_RES (24)..(24): Lys at position 24 is chemically modified by conjugation of the epsilon-amino group of the Lys side chain with (2-[2-(2-amino-ethoxy)-ethoxy]-acetyl)2-(gamma-Glu)2-CO-(CH2)12-C O2H
  MISC_FEATURE (25)..(25): Xaa at position 25 is alpha-methyl-Tyr
  MOD_RES (28)..(28): Lys at position 28 is chemically modified by conjugation of the epsilon-amino group of the Lys side chain with (2-[2-(2-amino-ethoxy)-ethoxy]-acetyl)2-(gamma-Glu)2-CO-(CH2)12-C O2H
  MOD_RES (39)..(39): Ser at position 39 is amidated

SEQ ID NO: 491 - protein, 39 aa, Artificial Sequence; identical to SEQ ID NO: 326
  Synthetic Construct
  MISC_FEATURE (2)..(2): Xaa at position 2 is Aib
  MISC_FEATURE (6)..(6): Xaa at position 6 is alpha-methyl-Phe(2F)
  MISC_FEATURE (11)..(11): Xaa at position 11 is Aib
  MISC_FEATURE (13)..(13): Xaa at position 13 is alpha-methyl-Leu
  MISC_FEATURE (16)..(16): Xaa at position 16 is Orn
  MISC_FEATURE (20)..(20): Xaa at position 20 is Aib
  MISC_FEATURE (21)..(21): Xaa at position 21 is Orn
  MOD_RES (24)..(24): Lys at position 24 is chemically modified by conjugation of the epsilon-amino group of the Lys side chain with (2-[2-(2-amino-ethoxy)-ethoxy]-acetyl)3-(gamma-Glu)-(10-(4-carbox yphenoxy)decanoyl)
  MISC_FEATURE (25)..(25): Xaa at position 25 is alpha-methyl-Tyr
  MOD_RES (28)..(28): Lys at position 28 is chemically modified by conjugation of the epsilon-amino group of the Lys side chain with (2-[2-(2-amino-ethoxy)-ethoxy]-acetyl)3-(gamma-Glu)-(10-(4-carbox yphenoxy)decanoyl)
  MOD_RES (39)..(39): Ser at position 39 is amidated

SEQ ID NO: 492 - protein, 39 aa, Artificial Sequence; identical to SEQ ID NO: 401
  Synthetic Construct
  MISC_FEATURE (2)..(2): Xaa at position 2 is Aib
  MISC_FEATURE (6)..(6): Xaa at position 6 is alpha-methyl-Phe(2F)
  MISC_FEATURE (10)..(10): Xaa at position 10 is 4Pal
  MISC_FEATURE (11)..(11): Xaa at position 11 is Aib
  MISC_FEATURE (13)..(13): Xaa at position 13 is alpha-methyl-Leu
  MISC_FEATURE (16)..(16): Xaa at position 16 is Orn
  MISC_FEATURE (20)..(20): Xaa at position 20 is Aib
  MISC_FEATURE (21)..(21): Xaa at position 21 is Orn
  MOD_RES (24)..(24): Lys at position 24 is chemically modified by conjugation of the epsilon-amino group of the Lys side chain with (gamma-Glu)-(2-[2-(2-amino-ethoxy)-ethoxy]-acetyl)2-(gamma-Glu)-C O-(CH2)12-CO2H
  MISC_FEATURE (25)..(25): Xaa at position 25 is alpha-methyl-Tyr
  MOD_RES (28)..(28): Lys at position 28 is chemically modified by conjugation of the epsilon-amino group of the Lys side chain with (gamma-Glu)-(2-[2-(2-amino-ethoxy)-ethoxy]-acetyl)2-(gamma-Glu)-C O-(CH2)12-CO2H
  MOD_RES (39)..(39): Ser at position 39 is amidated

SEQ ID NO: 493 - protein, 39 aa, Artificial Sequence; identical to SEQ ID NO: 401
  Synthetic Construct
  MISC_FEATURE (2)..(2): Xaa at position 2 is Aib
  MISC_FEATURE (6)..(6): Xaa at position 6 is alpha-methyl-Phe(2F)
  MISC_FEATURE (10)..(10): Xaa at position 10 is 4Pal
  MISC_FEATURE (11)..(11): Xaa at position 11 is Aib
  MISC_FEATURE (13)..(13): Xaa at position 13 is alpha-methyl-Leu
  MISC_FEATURE (16)..(16): Xaa at position 16 is Orn
  MISC_FEATURE (20)..(20): Xaa at position 20 is Aib
  MISC_FEATURE (21)..(21): Xaa at position 21 is Orn
  MOD_RES (24)..(24): Lys at position 24 is chemically modified by conjugation of the epsilon-amino group of the Lys side chain with (gamma-Glu)-(2-[2-(2-amino-ethoxy)-ethoxy]-acetyl)2-(gamma-Glu)-( 10-(4-carboxyphenoxy)decanoyl)
  MISC_FEATURE (25)..(25): Xaa at position 25 is alpha-methyl-Tyr
  MOD_RES (28)..(28): Lys at position 28 is chemically modified by conjugation of the epsilon-amino group of the Lys side chain with (gamma-Glu)-(2-[2-(2-amino-ethoxy)-ethoxy]-acetyl)2-(gamma-Glu)-( 10-(4-carboxyphenoxy)decanoyl)
  MOD_RES (39)..(39): Ser at position 39 is amidated

SEQ ID NO: 494 - protein, 39 aa, Artificial Sequence; identical to SEQ ID NO: 401
  Synthetic Construct
  MISC_FEATURE (2)..(2): Xaa at position 2 is Aib
  MISC_FEATURE (6)..(6): Xaa at position 6 is alpha-methyl-Phe(2F)
  MISC_FEATURE (10)..(10): Xaa at position 10 is 4Pal
  MISC_FEATURE (11)..(11): Xaa at position 11 is Aib
  MISC_FEATURE (13)..(13): Xaa at position 13 is alpha-methyl-Leu
  MISC_FEATURE (16)..(16): Xaa at position 16 is Orn
  MISC_FEATURE (20)..(20): Xaa at position 20 is Aib
  MISC_FEATURE (21)..(21): Xaa at position 21 is Orn
  MOD_RES (24)..(24): Lys at position 24 is chemically modified by conjugation of the epsilon-amino group of the Lys side chain with (2-[2-(2-amino-ethoxy)-ethoxy]-acetyl)-(gamma-Glu)-(2-[2-(2-amino -ethoxy)-ethoxy]-acetyl)-(gamma-Glu)-CO-(CH2)12-CO2H
  MISC_FEATURE (25)..(25): Xaa at position 25 is alpha-methyl-Tyr
  MOD_RES (28)..(28): Lys at position 28 is chemically modified by conjugation of the epsilon-amino group of the Lys side chain with (2-[2-(2-amino-ethoxy)-ethoxy]-acetyl)-(gamma-Glu)-(2-[2-(2-amino -ethoxy)-ethoxy]-acetyl)-(gamma-Glu)-CO-(CH2)12-CO2H
  MOD_RES (39)..(39): Ser at position 39 is amidated

SEQ ID NO: 495 - protein, 39 aa, Artificial Sequence; identical to SEQ ID NO: 401
  Synthetic Construct
  MISC_FEATURE (2)..(2): Xaa at position 2 is Aib
  MISC_FEATURE (6)..(6): Xaa at position 6 is alpha-methyl-Phe(2F)
  MISC_FEATURE (10)..(10): Xaa at position 10 is 4Pal
  MISC_FEATURE (11)..(11): Xaa at position 11 is Aib
  MISC_FEATURE (13)..(13): Xaa at position 13 is alpha-methyl-Leu
  MISC_FEATURE (16)..(16): Xaa at position 16 is Orn
  MISC_FEATURE (20)..(20): Xaa at position 20 is Aib
  MISC_FEATURE (21)..(21): Xaa at position 21 is Orn
  MOD_RES (24)..(24): Lys at position 24 is chemically modified by conjugation of the epsilon-amino group of the Lys side chain with (2-[2-(2-amino-ethoxy)-ethoxy]-acetyl)-(gamma-Glu)-(2-[2-(2-amino -ethoxy)-ethoxy]-acetyl)-(gamma-Glu)-(10-(4-carboxyphenoxy)decano
  MISC_FEATURE (25)..(25): Xaa at position 25 is alpha-methyl-Tyr
  MOD_RES (28)..(28): Lys at position 28 is chemically modified by conjugation of the epsilon-amino group of the Lys side chain with (2-[2-(2-amino-ethoxy)-ethoxy]-acetyl)-(gamma-Glu)-(2-[2-(2-amino -ethoxy)-ethoxy]-acetyl)-(gamma-Glu)-(10-(4-carboxyphenoxy)decano
  MOD_RES (39)..(39): Ser at position 39 is amidated

SEQ ID NO: 496 - protein, 39 aa, Artificial Sequence; identical to SEQ ID NO: 401
  Synthetic Construct
  MISC_FEATURE (2)..(2): Xaa at position 2 is Aib
  MISC_FEATURE (6)..(6): Xaa at position 6 is alpha-methyl-Phe(2F)
  MISC_FEATURE (10)..(10): Xaa at position 10 is 4Pal
  MISC_FEATURE (11)..(11): Xaa at position 11 is Aib
  MISC_FEATURE (13)..(13): Xaa at position 13 is alpha-methyl-Leu
  MISC_FEATURE (16)..(16): Xaa at position 16 is Orn
  MISC_FEATURE (20)..(20): Xaa at position 20 is Aib
  MISC_FEATURE (21)..(21): Xaa at position 21 is Orn
  MOD_RES (24)..(24): Lys at position 24 is chemically modified by conjugation of the epsilon-amino group of the Lys side chain with (2-[2-(2-amino-ethoxy)-ethoxy]-acetyl)-(gamma-Glu)3-CO-(CH2)12-CO 2H
  MISC_FEATURE (25)..(25): Xaa at position 25 is alpha-methyl-Tyr
  MOD_RES (28)..(28): Lys at position 28 is chemically modified by conjugation of the epsilon-amino group of the Lys side chain with (2-[2-(2-amino-ethoxy)-ethoxy]-acetyl)-(gamma-Glu)3-CO-(CH2)12-CO 2H
  MOD_RES (39)..(39): Ser at position 39 is amidated

SEQ ID NO: 497 - protein, 39 aa, Artificial Sequence; identical to SEQ ID NO: 401
  Synthetic Construct
  MISC_FEATURE (2)..(2): Xaa at position 2 is Aib
  MISC_FEATURE (6)..(6): Xaa at position 6 is alpha-methyl-Phe(2F)
  MISC_FEATURE (10)..(10): Xaa at position 10 is 4Pal
  MISC_FEATURE (11)..(11): Xaa at position 11 is Aib
  MISC_FEATURE (13)..(13): Xaa at position 13 is alpha-methyl-Leu
  MISC_FEATURE (16)..(16): Xaa at position 16 is Orn
  MISC_FEATURE (20)..(20): Xaa at position 20 is Aib
  MISC_FEATURE (21)..(21): Xaa at position 21 is Orn
  MOD_RES (24)..(24): Lys at position 24 is chemically modified by conjugation of the epsilon-amino group of the Lys side chain with (2-[2-(2-amino-ethoxy)-ethoxy]-acetyl)-(gamma-Glu)3-(10-(4-carbox yphenoxy)decanoyl)
  MISC_FEATURE (25)..(25): Xaa at position 25 is alpha-methyl-Tyr
  MOD_RES (28)..(28): Lys at position 28 is chemically modified by conjugation of the epsilon-amino group of the Lys side chain with (2-[2-(2-amino-ethoxy)-ethoxy]-acetyl)-(gamma-Glu)3-(10-(4-carbox yphenoxy)decanoyl)
  MOD_RES (39)..(39): Ser at position 39 is amidated

SEQ ID NO: 498 - protein, 39 aa, Artificial Sequence
  Synthetic Construct
  MISC_FEATURE (2)..(2): Xaa at position 2 is Aib
  MISC_FEATURE (6)..(6): Xaa at position 6 is alpha-methyl-Phe(2F)
  MISC_FEATURE (10)..(10): Xaa at position 10 is 4Pal
  MISC_FEATURE (11)..(11): Xaa at position 11 is Aib
  MISC_FEATURE (13)..(13): Xaa at position 13 is alpha-methyl-Leu
  MISC_FEATURE (16)..(16): Xaa at position 16 is Orn
  MISC_FEATURE (20)..(20): Xaa at position 20 is Aib
  MOD_RES (21)..(21): Lys at position 21 is chemically modified by conjugation of the epsilon-amino group of the Lys side chain with (2-[2-(2-amino-ethoxy)-ethoxy]-acetyl)2-(gamma-Glu)-CO-(CH2)12-CO 2H
  MISC_FEATURE (24)..(24): Xaa at position 24 is D-Glu
  MISC_FEATURE (25)..(25): Xaa at position 25 is alpha-methyl-Tyr
  MOD_RES (28)..(28): Lys at position 28 is chemically modified by conjugation of the epsilon-amino group of the Lys side chain with (2-[2-(2-amino-ethoxy)-ethoxy]-acetyl)2-(gamma-Glu)-CO-(CH2)12-CO 2H
  MOD_RES (39)..(39): Ser at position 39 is amidated
YXEGTXTSDXXIXLDXQAQXKFIXXLIKGGPSSGAPPPS

SEQ ID NO: 499 - protein, 40 aa, Artificial Sequence
  Synthetic Construct
  MISC_FEATURE (2)..(2): Xaa at position 2 is Aib
  MISC_FEATURE (6)..(6): Xaa at position 6 is alpha-methyl-Phe(2F)
  MISC_FEATURE (10)..(10): Xaa at position 10 is 4Pal
  MISC_FEATURE (11)..(11): Xaa at position 11 is Aib
  MISC_FEATURE (13)..(13): Xaa at position 13 is alpha-methyl-Leu
  MISC_FEATURE (16)..(16): Xaa at position 16 is Orn
  MISC_FEATURE (20)..(20): Xaa at position 20 is AIB
  MOD_RES (21)..(21): Lys at position 21 is chemically modified by conjugation of the epsilon-amino group of the Lys side chain with (2-[2-(2-amino-ethoxy)-ethoxy]-acetyl)2-(gamma-Glu)-CO-(CH2)12-CO 2H
  MISC_FEATURE (24)..(24): Xaa at position 24 is D-Glu
  MISC_FEATURE (25)..(25): Xaa at position 25 is alpha-methyl-Tyr
  MOD_RES (40)..(40): Lys at position 40 is chemically modified by conjugation of the epsilon-amino group of the Lys side chain with (2-[2-(2-amino-ethoxy)-ethoxy]-acetyl)2-(gamma-Glu)-CO-(CH2)12-CO 2H
  MOD_RES (40)..(40): Lys at position 40 is amidated
YXEGTXTSDXXIXLDXQAQXKFIXXLIEGGPSSGAPPPSK

SEQ ID NO: 500 - protein, 39 aa, Artificial Sequence
  Synthetic Construct
  MISC_FEATURE (2)..(2): Xaa at position 2 is Aib
  MISC_FEATURE (6)..(6): Xaa at position 6 is alpha-methyl-Phe(2F)
  MISC_FEATURE (10)..(10): Xaa at position 10 is Nle
  MISC_FEATURE (13)..(13): Xaa at position 13 is alpha-methyl-Leu
  MISC_FEATURE (16)..(16): Xaa at position 16 is Orn
  MISC_FEATURE (20)..(20): Xaa at position 20 is Aib
  MISC_FEATURE (21)..(21): Xaa at position 21 is Orn
  MOD_RES (24)..(24): Lys at position 24 is chemically modified by conjugation of the epsilon-amino group of the Lys side chain with (2-[2-(2-amino-ethoxy)-ethoxy]-acetyl)2-(gamma-Glu)-CO-(CH2)12-CO 2H
  MISC_FEATURE (25)..(25): Xaa at position 25 is alpha-methyl-Tyr
  MOD_RES (28)..(28): Lys at position 28 is chemically modified by conjugation of the epsilon-amino group of the Lys side chain with (2-[2-(2-amino-ethoxy)-ethoxy]-acetyl)2-(gamma-Glu)-CO-(CH2)12-CO 2H
  MOD_RES (39)..(39): Ser at position 39 is amidated
YXEGTXTSDXSIXLDXQAQXXFIKXLIKGGPSSGAPPPS

SEQ ID NO: 501 - protein, 39 aa, Artificial Sequence; identical to SEQ ID NO: 500
  Synthetic Construct
  MISC_FEATURE (2)..(2): Xaa at position 2 is Aib
  MISC_FEATURE (6)..(6): Xaa at position 6 is alpha-methyl-Phe(2F)
  MISC_FEATURE (10)..(10): Xaa at position 10 is hTyr
  MISC_FEATURE (13)..(13): Xaa at position 13 is alpha-methyl-Leu
  MISC_FEATURE (16)..(16): Xaa at position 16 is Orn
  MISC_FEATURE (20)..(20): Xaa at position 20 is Aib
  MISC_FEATURE (21)..(21): Xaa at position 21 is Orn
  MOD_RES (24)..(24): Lys at position 24 is chemically modified by conjugation of the epsilon-amino group of the Lys side chain with (2-[2-(2-amino-ethoxy)-ethoxy]-acetyl)2-(gamma-Glu)-CO-(CH2)12-CO 2H
  MISC_FEATURE (25)..(25): Xaa at position 25 is alpha-methyl-Tyr
  MOD_RES (28)..(28): Lys at position 28 is chemically modified by conjugation of the epsilon-amino group of the Lys side chain with (2-[2-(2-amino-ethoxy)-ethoxy]-acetyl)2-(gamma-Glu)-CO-(CH2)12-CO 2H
  MOD_RES (39)..(39): Ser at position 39 is amidated

SEQ ID NO: 502 - protein, 39 aa, Artificial Sequence; identical to SEQ ID NO: 411
  Synthetic Construct
  MISC_FEATURE (2)..(2): Xaa at position 2 is Aib
  MISC_FEATURE (6)..(6): Xaa at position 6 is alpha-methyl-Phe(2F)
  MISC_FEATURE (11)..(11): Xaa at position 11 is Aib
  MISC_FEATURE (13)..(13): Xaa at position 13 is alpha-methyl-Leu
  MISC_FEATURE (16)..(16): Xaa at position 16 is Orn
  MISC_FEATURE (20)..(20): Xaa at position 20 is Aib
  MISC_FEATURE (21)..(21): Xaa at position 21 is Orn
  MOD_RES (24)..(24): Lys at position 24 is chemically modified by conjugation of the epsilon-amino group of the Lys side chain with (2-[2-(2-amino-ethoxy)-ethoxy]-acetyl)2-(gamma-Glu)-(10-(4-carbox yphenoxy)decanoyl)
  MISC_FEATURE (25)..(25): Xaa at position 25 is alpha-methyl-Tyr
  MOD_RES (28)..(28): Lys at position 28 is chemically modified by conjugation of the epsilon-amino group of the Lys side chain with (2-[2-(2-amino-ethoxy)-ethoxy]-acetyl)2-(gamma-Glu)-(10-(4-carbox yphenoxy)decanoyl)
  MOD_RES (39)..(39): Ser at position 39 is amidated

SEQ ID NO: 503 - protein, 39 aa, Artificial Sequence; identical to SEQ ID NO: 401
  Synthetic Construct
  MISC_FEATURE (2)..(2): Xaa at position 2 is Aib
  MISC_FEATURE (6)..(6): Xaa at position 6 is alpha-methyl-Phe(2F)
  MISC_FEATURE (10)..(10): Xaa at position 10 is 4Pal
  MISC_FEATURE (11)..(11): Xaa at position 11 is Aib
  MISC_FEATURE (13)..(13): Xaa at position 13 is alpha-methyl-Leu
  MISC_FEATURE (16)..(16): Xaa at position 16 is Orn
  MISC_FEATURE (20)..(20): Xaa at position 20 is Aib
  MISC_FEATURE (21)..(21): Xaa at position 21 is 4Pal
  MOD_RES (24)..(24): Lys at position 24 is chemically modified by conjugation of the epsilon-amino group of the Lys side chain with (2-[2-(2-amino-ethoxy)-ethoxy]-acetyl)2-(gamma-Glu)-(10-(4-carbox yphenoxy)decanoyl)
  MISC_FEATURE (25)..(25): Xaa at position 25 is alpha-methyl-Tyr
  MOD_RES (28)..(28): Lys at position 28 is chemically modified by conjugation of the epsilon-amino group of the Lys side chain with (2-[2-(2-amino-ethoxy)-ethoxy]-acetyl)2-(gamma-Glu)-(10-(4-carbox yphenoxy)decanoyl)
  MOD_RES (39)..(39): Ser at position 39 is amidated

SEQ ID NO: 504 - protein, 39 aa, Artificial Sequence
  Synthetic Construct
  MISC_FEATURE (2)..(2): Xaa at position 2 is Aib
  MISC_FEATURE (6)..(6): Xaa at position 6 is alpha-methyl-Phe(2F)
  MISC_FEATURE (10)..(10): Xaa at position 10 is 4Pal
  MISC_FEATURE (11)..(11): Xaa at position 11 is Aib
  MISC_FEATURE (13)..(13): Xaa at position 13 is alpha-methyl-Leu
  MISC_FEATURE (16)..(16): Xaa at position 16 is Orn
  MOD_RES (17)..(17): Lys at position 17 is chemically modified by conjugation of the epsilon-amino group of the Lys side chain with (2-[2-(2-amino-ethoxy)-ethoxy]-acetyl)2-(gamma-Glu)-CO-(CH2)10-CH 3
  MISC_FEATURE (20)..(20): Xaa at position 20 is Aib
  MISC_FEATURE (24)..(24): Xaa at position 24 is D-Glu
  MISC_FEATURE (25)..(25): Xaa at position 25 is alpha-methyl-Tyr
  MOD_RES (28)..(28): Lys at position 28 is chemically modified by conjugation of the epsilon-amino group of the Lys side chain with (2-[2-(2-amino-ethoxy)-ethoxy]-acetyl)2-(gamma-Glu)-CO-(CH2)10-CH 3
  MOD_RES (39)..(39): Ser at position 39 is amidated
YXEGTXTSDXXIXLDXKAQXGFIXXLIKGGPSSGAPPPS

SEQ ID NO: 505 - protein, 30 aa, Artificial Sequence; identical to SEQ ID NO: 4
  Synthetic Construct; a compound of Formula I
  MISC_FEATURE (1)..(1): Xaa at position 1 selected from the group consisting of Y or R1Y, wherein R1 is an acetyl modification of the N-terminal amino group of Y
  MISC_FEATURE (2)..(2): Xaa at position 2 is Aib
  MISC_FEATURE (6)..(6): Xaa at position 6 iis selected from the group consisting of alpha-methyl-Phe and alpha-methyl-Phe(2F)
  MISC_FEATURE (10)..(10): Xaa at position 10 is selected from the group consisting of 4Pal, Y, alpha-methyl-Phe, alpha-methyl-Phe(2F), alpha-methyl-Leu, alpha-methyl-Val, Ac4c, Ac5c, Ac6c, Bip, 1Nal, 2Nal, OMeY, hTyr, Nle, V, 4CPhe, ChG, ChA, Bzt, 2FA, 4TAA, 2TA, 3TA, and KZ1
  MISC_FEATURE (10)..(10): Z1 is selected from the group consisting of R5 and -R4R5; R4 is a linker; and R5 is a fatty acid
  MISC_FEATURE (10)..(30): wherein two, and only two, of X10, X12, X17, X21, X24, X25, X28, X30, X31, and X40 are KZ1 or K(Z1)R6
  MISC_FEATURE (11)..(11): Xaa at position 11 is selected from the group consisting of S, alpha-methyl-Ser, Aib, G, Dap, Ac5c, and Tle
  MISC_FEATURE (12)..(12): Xaa at position 12 is selected from the group consisting of I and KZ1
  MISC_FEATURE (12)..(12): Z1 is selected from the group consisting of R5 and -R4R5; R4 is a linker; and R5 is a fatty acid
  MISC_FEATURE (13)..(13): Xaa at position 13 is selected from the group consisting of alpha-methyl-Leu and alpha-methyl-Phe
  MISC_FEATURE (16)..(16): Xaa at position 16 is Orn
  MISC_FEATURE (17)..(17): Xaa at position 17 is selected from the group consisting of Q, I, and KZ1
  MISC_FEATURE (17)..(17): Z1 is selected from the group consisting of R5 and -R4R5; R4 is a linker; and R5 is a fatty acid
  MISC_FEATURE (20)..(20): Xaa at position 20 is selected from the group consisting of Aib, Orn, 4Pal, alpha-methyl-Phe, Ac5c, and Ac6c
  MISC_FEATURE (21)..(21): Xaa at position 21 is selected from the group consisting of E, KZ1, G, Orn, and 4Pal
  MISC_FEATURE (21)..(21): Z1 is selected from the group consisting of R5 and -R4R5; R4 is a linker; and R5 is a fatty acid
  MISC_FEATURE (22)..(22): Xaa at position 22 is selected from the group consisting of F, 2ClPhe, 3ClPhe, 2FPhe, 3FPhe, 3,5FPhe, 1Nal, 2Nal, alpha-methyl-Phe(2F), ChA, Bzt, and alpha-methyl-Phe
  MISC_FEATURE (24)..(24): Xaa at position 24 is selected from the group consisting of D-Glu, E, G, and KZ1
  MISC_FEATURE (24)..(24): Z1 is selected from the group consisting of R5 and -R4R5; R4 is a linker; and R5 is a fatty acid
  MISC_FEATURE (25)..(25): Xaa at position 25 is selected from the group consisting of Y, alpha-methyl-Tyr, alpha-methyl-Phe, and KZ1
  MISC_FEATURE (25)..(25): Z1 is selected from the group consisting of R5 and -R4R5; R4 is a linker; and R5 is a fatty acid
  MISC_FEATURE (28)..(28): Xaa at position 28 is selected from the group consisting of E, Orn, and KZ1
  MISC_FEATURE (28)..(28): Z1 is selected from the group consisting of R5 and -R4R5; R4 is a linker; and R5 is a fatty acid
  MISC_FEATURE (30)..(30): Xaa at position 30 is selected from the group consisting of G, Orn, KZ1, K(Z1)R6, OrnR2, and GR2
  MISC_FEATURE (30)..(30): R2 is selected from the group consisting of X31, SEQ ID NO:5, SEQ ID NO:6, SEQ ID NO:7, SEQ ID NO:8, SEQ ID NO:9, SEQ ID NO:10, and a modification of the C-terminal group wherein the modification is NH2
  MISC_FEATURE (30)..(30): R6 is selected from the group consisting of SEQ ID NO:506, SEQ ID NO:507, SEQ ID NO:508, SEQ ID NO:509, SEQ ID NO:510, SEQ ID NO:511, and a modification of the C-terminal group wherein the modification is NH2
  MISC_FEATURE (30)..(30): X31 is selected from the group consisting of P and KZ1; X35 is selected from the group consisting of A and Orn; X39 is selected from the group consisting of S and Orn; X40 is KZ1
  MISC_FEATURE (30)..(30): R3 is a modification of the C-terminal group, wherein the modification is NH2
  MISC_FEATURE (30)..(30): Z1 is selected from the group consisting of R5 and -R4R5; R4 is a linker; and R5 is a fatty acid

SEQ ID NO: 506 - protein, 4 aa, Artificial Sequence
  Synthetic Construct
PSSG

SEQ ID NO: 507 - protein, 4 aa, Artificial Sequence
  Synthetic Construct
  MOD_RES (4)..(4): Gly is modified with R3; wherein R3 is a modification of the C-terminal group, wherein the modification is NH2
PSSG

SEQ ID NO: 508 - protein, 9 aa, Artificial Sequence
  Synthetic Construct
  MISC_FEATURE (5)..(5): Xaa at position 5 is selected from the group consisting of A and Orn
  MISC_FEATURE (9)..(9): Xaa at position 9 is selected from the group consisting of S and Orn
PSSGXPPPX

SEQ ID NO: 509 - protein, 9 aa, Artificial Sequence
  Synthetic Construct
  MISC_FEATURE (5)..(5): Xaa at position 5 is selected from the group consisting of A and Orn
  MISC_FEATURE (9)..(9): Xaa at position 9 is selected from the group consisting of S and Orn
  MOD_RES (9)..(9): Xaa at position 9 is modified with R3; wherein R3 is a modification of the C-terminal group, wherein the modification is NH2
PSSGXPPPX

SEQ ID NO: 510 - protein, 10 aa, Artificial Sequence
  Synthetic Construct
  MISC_FEATURE (5)..(5): Xaa at position 5 is selected from the group consisting of A and Orn
  MISC_FEATURE (9)..(9): Xaa at position 9 is selected from the group consisting of S and Orn
  MISC_FEATURE (10)..(10): Xaa at position 10 is KZ1; wherein Z1 is selected from the group consisting of R5 and -R4R5; R4 is a linker; and R5 is a fatty acid
PSSGXPPPXX

SEQ ID NO: 511 - protein, 10 aa, Artificial Sequence
  Synthetic Construct
  MISC_FEATURE (5)..(5): Xaa at position 5 is selected from the group consisting of A and Orn
  MISC_FEATURE (9)..(9): Xaa at position 9 is selected from the group consisting of S and Orn
  MISC_FEATURE (10)..(10): Xaa at position 10 is KZ1; wherein Z1 is selected from the group consisting of R5 and -R4R5; R4 is a linker; and R5 is a fatty acid
  MISC_FEATURE (10)..(10): Xaa at position 10 is modified with R3; wherein R3 is a modification of the C-terminal group, wherein the modification is NH2
PSSGXPPPXX
